United States Patent Application Publication US 2026/0284208 A1, published September 24, 2026 (application 19/167,189).

The application's sequence listing, which the Patent Office published only in electronic form, follows.

SEQUENCE LISTING (4446 sequences)

SEQ ID NO: 1 - protein, 10 aa, Synthetic construct
FQCNQCGASF

SEQ ID NO: 2 - protein, 509 aa, Homo sapiens
MEDIQTNAELKSTQEQSVPAESAAVLNDYSLTKSHEMENVDSGEGPANEDEDIGDDSMKVKDEYSERDENVLKSEPMGNAEEPEIPYSYSREYNEYENIKLERHVVSFDSSRPTSGKMNCDVCGLSCISFNVLMVHKRSHTGERPFQCNQCGASFTQKGNLLRHIKLHTGEKPFKCHLCNYACQRRDALTGHLRTHSVEKPYKCEFCGRSYKQRSSLEEHKERCRTFLQSTDPGDTASAEARHIKAEMGSERALVLDRLASNVAKRKSSMPQKFIGEKRHCFDVNYNSSYMYEKESELIQTRMMDQAINNAISYLGAEALRPLVQTPPAPTSEMVPVISSMYPIALTRAEMSNGAPQELEKKSIHLPEKSVPSERGLSPNNSGHDSTDTDSNHEERQNHIYQQNHMVLSRARNGMPLLKEVPRSYELLKPPPICPRDSVKVINKEGEVMDVYRCDHCRVLFLDYVMFTIHMGCHGFRDPFECNMCGYRSHDRYEFSSHIARGEHRALLK

SEQ ID NO: 3 - protein, 519 aa, Homo sapiens
MDADEGQDMSQVSGKESPPVSDTPDEGDEPMPIPEDLSTTSGGQQSSKSDRVVASNVKVETQSDEENGRACEMNGEECAEDLRMLDASGEKMNGSHRDQGSSALSGVGGIRLPNGKLKCDICGIICIGPNVLMVHKRSHTGERPFQCNQCGASFTQKGNLLRHIKLHSGEKPFKCHLCNYACRRRDALTGHLRTHSVGKPHKCGYCGRSYKQRSSLEEHKERCHNYLESMGLPGTLYPVIKEETNHSEMAEDLCKIGSERSLVLDRLASNVAKRKSSMPQKFLGDKGLSDTPYDSSASYEKENEMMKSHVMDQAINNAINYLGAESLRPLVQTPPGGSEVVPVISPMYQLHKPLAEGTPRSNHSAQDSAVENLLLLSKAKLVPSEREASPSNSCQDSTDTESNNEEQRSGLIYLTNHIAPHARNGLSLKEEHRAYDLLRAASENSQDALRVVSTSGEQMKVYKCEHCRVLFLDHVMYTIHMGCHGFRDPFECNMCGYHSQDRYEFSSHITRGEHRFHMS

SEQ ID NO: 4 - DNA, 66 bp, Synthetic construct
  source 1..66: mol_type = other DNA
ttccagtgtcccgtatgtggggcaaagtttactcagaaaggtaacctcctccgccacattaaactg

SEQ ID NO: 5 - DNA, 66 bp, Synthetic construct
  source 1..66: mol_type = other DNA
ttccaatgtcccgtttgtggggcaccttttactcagaaaggtaacctcctccgccacattaaactg

SEQ ID NO: 6 - DNA, 66 bp, Synthetic construct
  source 1..66: mol_type = other DNA
ttccagtgtaatatctgtggggcaacatttactcagaaaggtaacctcctccgccacattaaactg

SEQ ID NO: 7 - DNA, 66 bp, Synthetic construct
  source 1..66: mol_type = other DNA
ttccagtgtaacatatgtggggcaatctttactcagaaaggtaacctcctccgccacattaaactg

SEQ ID NO: 8 - DNA, 66 bp, Synthetic construct
  source 1..66: mol_type = other DNA
ttccagtgtcccatctgtggggcagactttactcagaaaggtaacctcctccgccacattaaactg

SEQ ID NO: 9 - DNA, 66 bp, Synthetic construct
  source 1..66: mol_type = other DNA
ttccagtgtcctgtatgtggggcaacttttactcagaaaggtaacctcctccgccacattaaactg

SEQ ID NO: 10 - DNA, 66 bp, Synthetic construct
  source 1..66: mol_type = other DNA
ttccagtgtcctatctgtggggcaatttttactcagaaaggtaacctcctccgccacattaaactg

SEQ ID NO: 11 - DNA, 66 bp, Synthetic construct
  source 1..66: mol_type = other DNA
ttccagtgtcctatctgtggggcaagctttactcagaaaggtaacctcctccgccacattaaactg

SEQ ID NO: 12 - DNA, 66 bp, Synthetic construct
  source 1..66: mol_type = other DNA
ttccagtgtgaggtttgtggggcacagtttactcagaaaggtaacctcctccgccacattaaactg

SEQ ID NO: 13 - DNA, 66 bp, Synthetic construct
  source 1..66: mol_type = other DNA
ttccagtgtcctatctgtggggcatgttttactcagaaaggtaacctcctccgccacattaaactg

SEQ ID NO: 14 - DNA, 66 bp, Synthetic construct
  source 1..66: mol_type = other DNA
ttccagtgtcccgtatgtggggcagagtttactcagaaaggtaacctcctccgccacattaaactg

SEQ ID NO: 15 - DNA, 66 bp, Synthetic construct
  source 1..66: mol_type = other DNA
ctgcagtgccctatctgcggcttcgtttgtactcagaaaggtaacctcctccgccacattaaactg

SEQ ID NO: 16 - DNA, 66 bp, Synthetic construct
  source 1..66: mol_type = other DNA
ttccaatgtgagatctgtggggcaagctttactcagaaaggtaacctcctccgccacattaaactg

SEQ ID NO: 17 - DNA, 66 bp, Synthetic construct
  source 1..66: mol_type = other DNA
ttccaatgtcccgtatgtggggcagtttttactcagaaaggtaacctcctccgccacattaaactg

SEQ ID NO: 18 - DNA, 66 bp, Synthetic construct
  source 1..66: mol_type = other DNA
ttccagtgtgaggtctgtggggcaacgtttactcagaaaggtaacctcctccgccacattaaactg

SEQ ID NO: 19 - DNA, 66 bp, Synthetic construct
  source 1..66: mol_type = other DNA
ttccagtgtgagatttgtggggcaccatttactcagaaaggtaacctcctccgccacattaaactg

SEQ ID NO: 20 - DNA, 66 bp, Synthetic construct
  source 1..66: mol_type = other DNA
ttccagtgtgaggtatgtggggcagtgtttactcagaaaggtaacctcctccgccacattaaactg

SEQ ID NO: 21 - DNA, 66 bp, Synthetic construct
  source 1..66: mol_type = other DNA
ttccaatgtaatatatgtggggcaccctttactcagaaaggtaacctcctccgccacattaaactg

SEQ ID NO: 22 - DNA, 66 bp, Synthetic construct
  source 1..66: mol_type = other DNA
ttccagtgtgaggtgtgtggggcacgctttactcagaaaggtaacctcctccgccacattaaactg

SEQ ID NO: 23 - DNA, 66 bp, Synthetic construct
  source 1..66: mol_type = other DNA
ttccaatgtgagatctgtggggcacgttttactcagaaaggtaacctcctccgccacattaaactg

SEQ ID NO: 24 - DNA, 66 bp, Synthetic construct
  source 1..66: mol_type = other DNA
ttccagtgtgaggtctgtggggcaatatttactcagaaaggtaacctcctccgccacattaaactg

SEQ ID NO: 25 - DNA, 66 bp, Synthetic construct
  source 1..66: mol_type = other DNA
ttccaatgtgaagtctgtggggcagagtttactcagaaaggtaacctcctccgccacattaaactg

SEQ ID NO: 26 - DNA, 66 bp, Synthetic construct
  source 1..66: mol_type = other DNA
ttccagtgtcccatttgtggggcaggttttactcagaaaggtaacctcctccgccacattaaactg

SEQ ID NO: 27 - DNA, 66 bp, Synthetic construct
  source 1..66: mol_type = other DNA
ttccagtgtccagtttgtggggcagcctttactcagaaaggtaacctcctccgccacattaaactg

SEQ ID NO: 28 - DNA, 66 bp, Synthetic construct
  source 1..66: mol_type = other DNA
ttccagtgtgaagtgtgtggggcatgctttactcagaaaggtaacctcctccgccacattaaactg

SEQ ID NO: 29 - DNA, 66 bp, Synthetic construct
  source 1..66: mol_type = other DNA
ttccaatgtgagatctgtggggcaatctttactcagaaaggtaacctcctccgccacattaaactg

SEQ ID NO: 30 - DNA, 66 bp, Synthetic construct
  source 1..66: mol_type = other DNA
ttccagtgtcccatctgtggggcagtgtttactcagaaaggtaacctcctccgccacattaaactg

SEQ ID NO: 31 - DNA, 66 bp, Synthetic construct
  source 1..66: mol_type = other DNA
ctgcaatgccccatctgcgggtttacatgtactcagaaaggtaacctcctccgccacattaaactg

SEQ ID NO: 32 - DNA, 66 bp, Synthetic construct
  source 1..66: mol_type = other DNA
ttccaatgtcctatttgtggggcaccatttactcagaaaggtaacctcctccgccacattaaactg

SEQ ID NO: 33 - DNA, 66 bp, Synthetic construct
  source 1..66: mol_type = other DNA
ttcgtgtgtgaaatctgtggggcaccctttactcagaaaggtaacctcctccgccacattaaactg

SEQ ID NO: 34 - DNA, 66 bp, Synthetic construct
  source 1..66: mol_type = other DNA
ttccaatgtgaagtttgtggggcagcctttactcagaaaggtaacctcctccgccacattaaactg

SEQ ID NO: 35 - DNA, 66 bp, Synthetic construct
  source 1..66: mol_type = other DNA
ctgcagtgcgagatttgtggcttcacatgcactcagaaaggtaacctcctccgccacattaaactg

SEQ ID NO: 36 - DNA, 66 bp, Synthetic construct
  source 1..66: mol_type = other DNA
ttccagtgtccaatctgtggggcacagtttactcagaaaggtaacctcctccgccacattaaactg

SEQ ID NO: 37 - DNA, 66 bp, Synthetic construct
  source 1..66: mol_type = other DNA
ttccaatgtgaaatctgtggggcagcatttactcagaaaggtaacctcctccgccacattaaactg

SEQ ID NO: 38 - DNA, 66 bp, Synthetic construct
  source 1..66: mol_type = other DNA
ttccagtgtcccgtatgtggggcaaggtttactcagaaaggtaacctcctccgccacattaaactg

SEQ ID NO: 39 - DNA, 66 bp, Synthetic construct
  source 1..66: mol_type = other DNA
ctcgagtgtcccatctgcgggtttcgctgcactcagaaaggtaacctcctccgccacattaaactg

SEQ ID NO: 40 - DNA, 66 bp, Synthetic construct
  source 1..66: mol_type = other DNA
ttcaggtgtgaggtttgtggggcaccgtttactcagaaaggtaacctcctccgccacattaaactg

SEQ ID NO: 41 - DNA, 66 bp, Synthetic construct
  source 1..66: mol_type = other DNA
ttccaatgtccaatctgtggggcaatgtttactcagaaaggtaacctcctccgccacattaaactg

SEQ ID NO: 42 - DNA, 66 bp, Synthetic construct
  source 1..66: mol_type = other DNA
ctagaatgccccatctgtggtttttcgtgtactcagaaaggtaacctcctccgccacattaaactg

SEQ ID NO: 43 - DNA, 66 bp, Synthetic construct
  source 1..66: mol_type = other DNA
ttccaatgtccaatttgtggggcagagtttactcagaaaggtaacctcctccgccacattaaactg

SEQ ID NO: 44 - DNA, 66 bp, Synthetic construct
  source 1..66: mol_type = other DNA
ctccaatgccccatttgtgggttctgctgtactcagaaaggtaacctcctccgccacattaaactg

SEQ ID NO: 45 - DNA, 66 bp, Synthetic construct
  source 1..66: mol_type = other DNA
ttccaatgtcctgtgtgtggggcatcatttactcagaaaggtaacctcctccgccacattaaactg

SEQ ID NO: 46 - DNA, 66 bp, Synthetic construct
  source 1..66: mol_type = other DNA
ttccagtgtgagatttgtggggcaaactttactcagaaaggtaacctcctccgccacattaaactg

SEQ ID NO: 47 - DNA, 66 bp, Synthetic construct
  source 1..66: mol_type = other DNA
ttccagtgtcccgtgtgtggggcacagtttactcagaaaggtaacctcctccgccacattaaactg

SEQ ID NO: 48 - DNA, 66 bp, Synthetic construct
  source 1..66: mol_type = other DNA
ctggtgtgccccatctgcggcttctcttgtactcagaaaggtaacctcctccgccacattaaactg

SEQ ID NO: 49 - DNA, 66 bp, Synthetic construct
  source 1..66: mol_type = other DNA
ttccagtgtccagtctgtggggcaatgtttactcagaaaggtaacctcctccgccacattaaactg

SEQ ID NO: 50 - DNA, 66 bp, Synthetic construct
  source 1..66: mol_type = other DNA
ttccagtgtcctatttgtggggcaaattttactcagaaaggtaacctcctccgccacattaaactg

SEQ ID NO: 51 - DNA, 66 bp, Synthetic construct
  source 1..66: mol_type = other DNA
ttacagtgcgaaatatgcggattcagctgcactcagaaaggtaacctcctccgccacattaaactg

SEQ ID NO: 52 - DNA, 66 bp, Synthetic construct
  source 1..66: mol_type = other DNA
ctccagtgcgagatctgtggttttagatgtactcagaaaggtaacctcctccgccacattaaactg

SEQ ID NO: 53 - DNA, 66 bp, Synthetic construct
  source 1..66: mol_type = other DNA
ttccgctgtgaaatctgtggggcaccctttactcagaaaggtaacctcctccgccacattaaactg

SEQ ID NO: 54 - DNA, 66 bp, Synthetic construct
  source 1..66: mol_type = other DNA
ttccagtgtgagatctgtggggcaatgtttactcagaaaggtaacctcctccgccacattaaactg

SEQ ID NO: 55 - DNA, 66 bp, Synthetic construct
  source 1..66: mol_type = other DNA
ttccagtgtgaagtttgtggggcaaattttactcagaaaggtaacctcctccgccacattaaactg

SEQ ID NO: 56 - DNA, 66 bp, Synthetic construct
  source 1..66: mol_type = other DNA
ttccagtgtccaatatgtggggcaacctttactcagaaaggtaacctcctccgccacattaaactg

SEQ ID NO: 57 - DNA, 66 bp, Synthetic construct
  source 1..66: mol_type = other DNA
ctcgtttgcccaatttgtgggtttgcttgtactcagaaaggtaacctcctccgccacattaaactg

SEQ ID NO: 58 - DNA, 66 bp, Synthetic construct
  source 1..66: mol_type = other DNA
ttccagtgtgagatttgtggggcacagtttactcagaaaggtaacctcctccgccacattaaactg

SEQ ID NO: 59 - DNA, 66 bp, Synthetic construct
  source 1..66: mol_type = other DNA
ctgcaatgtccaatctgtggctttatgtgcactcagaaaggtaacctcctccgccacattaaactg

SEQ ID NO: 60 - DNA, 66 bp, Synthetic construct
  source 1..66: mol_type = other DNA
ctccagtgcccgatttgtgggtttgcttgtactcagaaaggtaacctcctccgccacattaaactg

SEQ ID NO: 61 - DNA, 66 bp, Synthetic construct
  source 1..66: mol_type = other DNA
ttcgagtgtgaaatctgtggggcacgctttactcagaaaggtaacctcctccgccacattaaactg

SEQ ID NO: 62 - DNA, 66 bp, Synthetic construct
  source 1..66: mol_type = other DNA
ttccaatgtccaatttgtggggcaaggtttactcagaaaggtaacctcctccgccacattaaactg

SEQ ID NO: 63 - DNA, 66 bp, Synthetic construct
  source 1..66: mol_type = other DNA
ttcgtatgtgaggtttgtggggcatcctttactcagaaaggtaacctcctccgccacattaaactg

SEQ ID NO: 64 - DNA, 66 bp, Synthetic construct
  source 1..66: mol_type = other DNA
ttccaatgtgaggtctgtggggcaccatttactcagaaaggtaacctcctccgccacattaaactg

SEQ ID NO: 65 - DNA, 66 bp, Synthetic construct
  source 1..66: mol_type = other DNA
ttccagtgtgaaatatgtggggcactttttactcagaaaggtaacctcctccgccacattaaactg

SEQ ID NO: 66 - DNA, 66 bp, Synthetic construct
  source 1..66: mol_type = other DNA
ttacagtgtccaatctgcggatttagctgtactcagaaaggtaacctcctccgccacattaaactg

SEQ ID NO: 67 - DNA, 66 bp, Synthetic construct
  source 1..66: mol_type = other DNA
ttccagtgtgaggtctgtggggcatcctttactcagaaaggtaacctcctccgccacattaaactg

SEQ ID NO: 68 - DNA, 66 bp, Synthetic construct
  source 1..66: mol_type = other DNA
ttccaatgtcctatatgtggggcagcttttactcagaaaggtaacctcctccgccacattaaactg

SEQ ID NO: 69 - DNA, 66 bp, Synthetic construct
  source 1..66: mol_type = other DNA
ttccgctgtcccatctgtggggcaccatttactcagaaaggtaacctcctccgccacattaaactg

SEQ ID NO: 70 - DNA, 66 bp, Synthetic construct
  source 1..66: mol_type = other DNA
ttccagtgtccagtgtgtggggcaatttttactcagaaaggtaacctcctccgccacattaaactg

SEQ ID NO: 71 - DNA, 66 bp, Synthetic construct
  source 1..66: mol_type = other DNA
ttccaatgtgagatctgtggggcagaatttactcagaaaggtaacctcctccgccacattaaactg

SEQ ID NO: 72 - DNA, 66 bp, Synthetic construct
  source 1..66: mol_type = other DNA
ttccagtgtgaggtgtgtggggcaatgtttactcagaaaggtaacctcctccgccacattaaactg

SEQ ID NO: 73 - DNA, 66 bp, Synthetic construct
  source 1..66: mol_type = other DNA
ttcaggtgtgatatctgtggggcaccctttactcagaaaggtaacctcctccgccacattaaactg

SEQ ID NO: 74 - DNA, 66 bp, Synthetic construct
  source 1..66: mol_type = other DNA
ttccgctgtcccgtttgtggggcaccatttactcagaaaggtaacctcctccgccacattaaactg

SEQ ID NO: 75 - DNA, 66 bp, Synthetic construct
  source 1..66: mol_type = other DNA
ttccaatgtcctgtctgtggggcactgtttactcagaaaggtaacctcctccgccacattaaactg

SEQ ID NO: 76 - DNA, 66 bp, Synthetic construct
  source 1..66: mol_type = other DNA
ctcacctgcccaatctgcgggttcagctgtactcagaaaggtaacctcctccgccacattaaactg

SEQ ID NO: 77 - DNA, 66 bp, Synthetic construct
  source 1..66: mol_type = other DNA
ttcgtgtgtcctatctgtggggcaccttttactcagaaaggtaacctcctccgccacattaaactg

SEQ ID NO: 78 - DNA, 66 bp, Synthetic construct
  source 1..66: mol_type = other DNA
ttccaatgtccggtttgtggggcaaactttactcagaaaggtaacctcctccgccacattaaactg

SEQ ID NO: 79 - DNA, 66 bp, Synthetic construct
  source 1..66: mol_type = other DNA
ttccaatgtgaaatctgtggggcatgttttactcagaaaggtaacctcctccgccacattaaactg

SEQ ID NO: 80 - DNA, 66 bp, Synthetic construct
  source 1..66: mol_type = other DNA
ttccaatgtaacatatgtggggcagtgtttactcagaaaggtaacctcctccgccacattaaactg

SEQ ID NO: 81 - DNA, 66 bp, Synthetic construct
  source 1..66: mol_type = other DNA
ctgcagtgcccgatctgcgggttctactgcactcagaaaggtaacctcctccgccacattaaactg

SEQ ID NO: 82 - DNA, 66 bp, Synthetic construct
  source 1..66: mol_type = other DNA
ttccagtgtgacatctgtggggcaatctttactcagaaaggtaacctcctccgccacattaaactg

SEQ ID NO: 83 - DNA, 66 bp, Synthetic construct
  source 1..66: mol_type = other DNA
ttccaatgtcctgtctgtggggcatgctttactcagaaaggtaacctcctccgccacattaaactg

SEQ ID NO: 84 - DNA, 66 bp, Synthetic construct
  source 1..66: mol_type = other DNA
ttccagtgtgaaatttgtggggcaaagtttactcagaaaggtaacctcctccgccacattaaactg

SEQ ID NO: 85 - DNA, 66 bp, Synthetic construct
  source 1..66: mol_type = other DNA
ttgcagtgcccaatttgcggtttcatttgtactcagaaaggtaacctcctccgccacattaaactg

SEQ ID NO: 86 - DNA, 66 bp, Synthetic construct
  source 1..66: mol_type = other DNA
ctacagtgccccatttgcggtttccagtgcactcagaaaggtaacctcctccgccacattaaactg

SEQ ID NO: 87 - DNA, 66 bp, Synthetic construct
  source 1..66: mol_type = other DNA
ctgacgtgtcccatttgtgggtttacgtgtactcagaaaggtaacctcctccgccacattaaactg

SEQ ID NO: 88 - DNA, 66 bp, Synthetic construct
  source 1..66: mol_type = other DNA
ctgcagtgccccatttgcgggttcgagtgtactcagaaaggtaacctcctccgccacattaaactg

SEQ ID NO: 89 - DNA, 66 bp, Synthetic construct
  source 1..66: mol_type = other DNA
ctgagatgtcctatttgtggctttccctgcactcagaaaggtaacctcctccgccacattaaactg

SEQ ID NO: 90 - DNA, 66 bp, Synthetic construct
  source 1..66: mol_type = other DNA
ttccagtgtcccatctgtggggcaaaatttactcagaaaggtaacctcctccgccacattaaactg

SEQ ID NO: 91 - DNA, 66 bp, Synthetic construct
  source 1..66: mol_type = other DNA
ttcatctgtgagatttgtggggcaccttttactcagaaaggtaacctcctccgccacattaaactg

SEQ ID NO: 92 - DNA, 66 bp, Synthetic construct
  source 1..66: mol_type = other DNA
ttccagtgtccgcagtgtggggcagtttttactcagaaaggtaacctcctccgccacattaaactg

SEQ ID NO: 93 - DNA, 66 bp, Synthetic construct
  source 1..66: mol_type = other DNA
ttcctgtgtcccgtctgtggggcaccttttactcagaaaggtaacctcctccgccacattaaactg

SEQ ID NO: 94 - DNA, 66 bp, Synthetic construct
  source 1..66: mol_type = other DNA
ttccagtgtaacgtttgtggggcagtatttactcagaaaggtaacctcctccgccacattaaactg

SEQ ID NO: 95 - DNA, 66 bp, Synthetic construct
  source 1..66: mol_type = other DNA
ctccagtgtgagatatgtgggtttgcatgcactcagaaaggtaacctcctccgccacattaaactg

SEQ ID NO: 96 - DNA, 66 bp, Synthetic construct
  source 1..66: mol_type = other DNA
ctgcagtgtccgatctgtggtttcaagtgtactcagaaaggtaacctcctccgccacattaaactg

SEQ ID NO: 97 - DNA, 66 bp, Synthetic construct
  source 1..66: mol_type = other DNA
ttccaatgtgaggtgtgtggggcaaagtttactcagaaaggtaacctcctccgccacattaaactg

SEQ ID NO: 98 - DNA, 66 bp, Synthetic construct
  source 1..66: mol_type = other DNA
ttccagtgtccagtctgtggggcagactttactcagaaaggtaacctcctccgccacattaaactg

SEQ ID NO: 99 - DNA, 66 bp, Synthetic construct
  source 1..66: mol_type = other DNA
ctgcagtgcgaaatctgcggctttgtctgcactcagaaaggtaacctcctccgccacattaaactg

SEQ ID NO: 100 - DNA, 66 bp, Synthetic construct
  source 1..66: mol_type = other DNA
ttccagtgtaatatttgtggggcagcatttactcagaaaggtaacctcctccgccacattaaactg

SEQ ID NO: 101 - DNA, 66 bp, Synthetic construct
  source 1..66: mol_type = other DNA
ctggaatgtccgatttgtggctttacctgcactcagaaaggtaacctcctccgccacattaaactg

SEQ ID NO: 102 - DNA, 66 bp, Synthetic construct
  source 1..66: mol_type = other DNA
ttgtgctgtccgatatgtggattcacctgtactcagaaaggtaacctcctccgccacattaaactg

SEQ ID NO: 103 - DNA, 66 bp, Synthetic construct
  source 1..66: mol_type = other DNA
ttccagtgtcccgtgtgtggggcaggctttactcagaaaggtaacctcctccgccacattaaactg

SEQ ID NO: 104 - DNA, 66 bp, Synthetic construct
  source 1..66: mol_type = other DNA
ttcaggtgtaacatttgtggggcaccgtttactcagaaaggtaacctcctccgccacattaaactg

SEQ ID NO: 105 - DNA, 66 bp, Synthetic construct
  source 1..66: mol_type = other DNA
ttccaatgtaacatatgtggggcatgttttactcagaaaggtaacctcctccgccacattaaactg

SEQ ID NO: 106 - DNA, 66 bp, Synthetic construct
  source 1..66: mol_type = other DNA
ttccaatgtaacgtgtgtggggcaatttttactcagaaaggtaacctcctccgccacattaaactg

SEQ ID NO: 107 - DNA, 66 bp, Synthetic construct
  source 1..66: mol_type = other DNA
ttccaatgtccaatttgtggggcactctttactcagaaaggtaacctcctccgccacattaaactg

SEQ ID NO: 108 - DNA, 66 bp, Synthetic construct
  source 1..66: mol_type = other DNA
ttcgaatgtcctatttgtggggcacgctttactcagaaaggtaacctcctccgccacattaaactg

SEQ ID NO: 109 - DNA, 66 bp, Synthetic construct
  source 1..66: mol_type = other DNA
ttccagtgtccaatctgtggggcatattttactcagaaaggtaacctcctccgccacattaaactg

SEQ ID NO: 110 - DNA, 66 bp, Synthetic construct
  source 1..66: mol_type = other DNA
ttcgtctgtgaagtgtgtggggcagcatttactcagaaaggtaacctcctccgccacattaaactg

SEQ ID NO: 111 - DNA, 66 bp, Synthetic construct
  source 1..66: mol_type = other DNA
ctgcagtgtccaatctgtggattcaggtgcactcagaaaggtaacctcctccgccacattaaactg

SEQ ID NO: 112 - DNA, 66 bp, Synthetic construct
  source 1..66: mol_type = other DNA
ttccagtgtgatatttgtggggcaccctttactcagaaaggtaacctcctccgccacattaaactg

SEQ ID NO: 113 - DNA, 66 bp, Synthetic construct
  source 1..66: mol_type = other DNA
ctggagtgcccaatctgtggattctactgcactcagaaaggtaacctcctccgccacattaaactg

SEQ ID NO: 114 - DNA, 66 bp, Synthetic construct
  source 1..66: mol_type = other DNA
ttccagtgtaatatttgtggggcatcatttactcagaaaggtaacctcctccgccacattaaactg

SEQ ID NO: 115 - DNA, 66 bp, Synthetic construct
  source 1..66: mol_type = other DNA
ttcgtctgtaacatttgtggggcaccctttactcagaaaggtaacctcctccgccacattaaactg

SEQ ID NO: 116 - DNA, 66 bp, Synthetic construct
  source 1..66: mol_type = other DNA
ttcgagtgtccaatctgtggggcagtctttactcagaaaggtaacctcctccgccacattaaactg

SEQ ID NO: 117 - DNA, 66 bp, Synthetic construct
  source 1..66: mol_type = other DNA
ttcacttgtccagtgtgtggggcatgttttactcagaaaggtaacctcctccgccacattaaactg

SEQ ID NO: 118 - DNA, 66 bp, Synthetic construct
  source 1..66: mol_type = other DNA
ttagtgtgcgaaatctgcggcttctcctgcactcagaaaggtaacctcctccgccacattaaactg

SEQ ID NO: 119 - DNA, 66 bp, Synthetic construct
  source 1..66: mol_type = other DNA
ttcgagtgtccaatctgtggggcatcttttactcagaaaggtaacctcctccgccacattaaactg

SEQ ID NO: 120 - DNA, 66 bp, Synthetic construct
  source 1..66: mol_type = other DNA
ttccagtgtcctatttgtggggcacattttactcagaaaggtaacctcctccgccacattaaactg

SEQ ID NO: 121 - DNA, 66 bp, Synthetic construct
  source 1..66: mol_type = other DNA
ttcacttgtccaatctgtggggcatattttactcagaaaggtaacctcctccgccacattaaactg

SEQ ID NO: 122 - DNA, 66 bp, Synthetic construct
  source 1..66: mol_type = other DNA
ctccagtgcccgatctgcggatttcactgcactcagaaaggtaacctcctccgccacattaaactg

SEQ ID NO: 123 - DNA, 66 bp, Synthetic construct
  source 1..66: mol_type = other DNA
ttccaatgtgatatatgtggggcatgttttactcagaaaggtaacctcctccgccacattaaactg

SEQ ID NO: 124 - DNA, 66 bp, Synthetic construct
  source 1..66: mol_type = other DNA
ctgcagtgtgagatttgcggtttccaatgtactcagaaaggtaacctcctccgccacattaaactg

SEQ ID NO: 125 - DNA, 66 bp, Synthetic construct
  source 1..66: mol_type = other DNA
ttcgagtgtgaagtttgtggggcaaggtttactcagaaaggtaacctcctccgccacattaaactg

SEQ ID NO: 126 - DNA, 66 bp, Synthetic construct
  source 1..66: mol_type = other DNA
ttccagtgtgatatctgtggggcaaagtttactcagaaaggtaacctcctccgccacattaaactg

SEQ ID NO: 127 - DNA, 66 bp, Synthetic construct
  source 1..66: mol_type = other DNA
ttccagtgtaatatttgtggggcacaatttactcagaaaggtaacctcctccgccacattaaactg

SEQ ID NO: 128 - DNA, 66 bp, Synthetic construct
  source 1..66: mol_type = other DNA
ctcgtctgcgagatttgtggcttcagatgcactcagaaaggtaacctcctccgccacattaaactg

SEQ ID NO: 129 - DNA, 66 bp, Synthetic construct
  source 1..66: mol_type = other DNA
ttccaatgtccccagtgtggggcagcatttactcagaaaggtaacctcctccgccacattaaactg

SEQ ID NO: 130 - DNA, 66 bp, Synthetic construct
  source 1..66: mol_type = other DNA
ttcgaatgtcccatatgtggggcaaattttactcagaaaggtaacctcctccgccacattaaactg

SEQ ID NO: 131 - DNA, 66 bp, Synthetic construct
  source 1..66: mol_type = other DNA
ctgcaatgcgaaatttgtggattcaagtgcactcagaaaggtaacctcctccgccacattaaactg

SEQ ID NO: 132 - DNA, 66 bp, Synthetic construct
  source 1..66: mol_type = other DNA
ttccagtgtcccgtgtgtggggcacactttactcagaaaggtaacctcctccgccacattaaactg

SEQ ID NO: 133 - DNA, 66 bp, Synthetic construct
  source 1..66: mol_type = other DNA
ttccagtgtaatatctgtggggcacgctttactcagaaaggtaacctcctccgccacattaaactg

SEQ ID NO: 134 - DNA, 66 bp, Synthetic construct
  source 1..66: mol_type = other DNA
ttccagtgtaatatttgtggggcaaagtttactcagaaaggtaacctcctccgccacattaaactg

SEQ ID NO: 135 - DNA, 66 bp, Synthetic construct
  source 1..66: mol_type = other DNA
ttagaatgccctatctgtggctttaaatgcactcagaaaggtaacctcctccgccacattaaactg

SEQ ID NO: 136 - DNA, 66 bp, Synthetic construct
  source 1..66: mol_type = other DNA
ttcacatgtgaggtgtgtggggcaagatttactcagaaaggtaacctcctccgccacattaaactg

SEQ ID NO: 137 - DNA, 66 bp, Synthetic construct
  source 1..66: mol_type = other DNA
ttccaatgtgagatttgtggggcaacatttactcagaaaggtaacctcctccgccacattaaactg

SEQ ID NO: 138 - DNA, 66 bp, Synthetic construct
  source 1..66: mol_type = other DNA
ttccagtgtcctcagtgtggggcatgttttactcagaaaggtaacctcctccgccacattaaactg

SEQ ID NO: 139 - DNA, 66 bp, Synthetic construct
  source 1..66: mol_type = other DNA
ttcgtatgtgaggtctgtggggcacgatttactcagaaaggtaacctcctccgccacattaaactg

SEQ ID NO: 140 - DNA, 66 bp, Synthetic construct
  source 1..66: mol_type = other DNA
ttcacatgtcccatctgtggggcaccgtttactcagaaaggtaacctcctccgccacattaaactg

SEQ ID NO: 141 - DNA, 66 bp, Synthetic construct
  source 1..66: mol_type = other DNA
ttccagtgtgatatctgtggggcaacgtttactcagaaaggtaacctcctccgccacattaaactg

SEQ ID NO: 142 - DNA, 66 bp, Synthetic construct
  source 1..66: mol_type = other DNA
ttccagtgtaacatctgtggggcagaatttactcagaaaggtaacctcctccgccacattaaactg

SEQ ID NO: 143 - DNA, 66 bp, Synthetic construct
  source 1..66: mol_type = other DNA
cttatctgtgagatatgcggattttcctgcactcagaaaggtaacctcctccgccacattaaactg

SEQ ID NO: 144 - DNA, 66 bp, Synthetic construct
  source 1..66: mol_type = other DNA
ctatgctgtcctatttgtggtttctactgtactcagaaaggtaacctcctccgccacattaaactg

SEQ ID NO: 145 - DNA, 66 bp, Synthetic construct
  source 1..66: mol_type = other DNA
ctaacctgtcccatatgtggtttttattgcactcagaaaggtaacctcctccgccacattaaactg

SEQ ID NO: 146 - DNA, 66 bp, Synthetic construct
  source 1..66: mol_type = other DNA
ttccagtgtgagatttgtggggcatattttactcagaaaggtaacctcctccgccacattaaactg

SEQ ID NO: 147 - DNA, 66 bp, Synthetic construct
  source 1..66: mol_type = other DNA
ttcacctgtgaaatttgtggggcaaggtttactcagaaaggtaacctcctccgccacattaaactg

SEQ ID NO: 148 - DNA, 66 bp, Synthetic construct
  source 1..66: mol_type = other DNA
ctgcagtgtcctatctgcggtttcggctgtactcagaaaggtaacctcctccgccacattaaactg

SEQ ID NO: 149 - DNA, 66 bp, Synthetic construct
  source 1..66: mol_type = other DNA
ttcacttgtccaatctgtggggcaagctttactcagaaaggtaacctcctccgccacattaaactg

SEQ ID NO: 150 - DNA, 66 bp, Synthetic construct
  source 1..66: mol_type = other DNA
ctccagtgtcccatttgcggattcctgtgtactcagaaaggtaacctcctccgccacattaaactg

SEQ ID NO: 151 - DNA, 66 bp, Synthetic construct
  source 1..66: mol_type = other DNA
ttcgtgtgtgaaatttgtggggcaggttttactcagaaaggtaacctcctccgccacattaaactg

SEQ ID NO: 152 - DNA, 66 bp, Synthetic construct
  source 1..66: mol_type = other DNA
ttcgtgtgtgagatctgtggggcacagtttactcagaaaggtaacctcctccgccacattaaactg

SEQ ID NO: 153 - DNA, 66 bp, Synthetic construct
  source 1..66: mol_type = other DNA
ttccagtgtgaaatttgtggggcagtttttactcagaaaggtaacctcctccgccacattaaactg

SEQ ID NO: 154 - DNA, 66 bp, Synthetic construct
  source 1..66: mol_type = other DNA
ttagtctgccctatctgcggttttacctgcactcagaaaggtaacctcctccgccacattaaactg

SEQ ID NO: 155 - DNA, 66 bp, Synthetic construct
  source 1..66: mol_type = other DNA
ctccagtgtgagatctgtggtttcatatgcactcagaaaggtaacctcctccgccacattaaactg

SEQ ID NO: 156 - DNA, 66 bp, Synthetic construct
  source 1..66: mol_type = other DNA
ttccagtgtgaggtttgtggggcaggttttactcagaaaggtaacctcctccgccacattaaactg

SEQ ID NO: 157 - DNA, 66 bp, Synthetic construct
  source 1..66: mol_type = other DNA
ttccaatgtaacgtgtgtggggcatgttttactcagaaaggtaacctcctccgccacattaaactg

SEQ ID NO: 158 - DNA, 66 bp, Synthetic construct
  source 1..66: mol_type = other DNA
ttccagtgtgaggtctgtggggcactgtttactcagaaaggtaacctcctccgccacattaaactg

SEQ ID NO: 159 - DNA, 66 bp, Synthetic construct
  source 1..66: mol_type = other DNA
ctggtgtgtgaaatctgcgggttcacatgtactcagaaaggtaacctcctccgccacattaaactg

SEQ ID NO: 160 - DNA, 66 bp, Synthetic construct
  source 1..66: mol_type = other DNA
ttggtctgtccaatttgcgggttccgatgtactcagaaaggtaacctcctccgccacattaaactg

SEQ ID NO: 161 - DNA, 66 bp, Synthetic construct
  source 1..66: mol_type = other DNA
ttgacttgcgagatatgtggattctcctgcactcagaaaggtaacctcctccgccacattaaactg

SEQ ID NO: 162 - DNA, 66 bp, Synthetic construct
  source 1..66: mol_type = other DNA
ttcgtttgtccggtctgtggggcaccatttactcagaaaggtaacctcctccgccacattaaactg

SEQ ID NO: 163 - DNA, 66 bp, Synthetic construct
  source 1..66: mol_type = other DNA
ttgatctgcccaatttgcggcttctcctgcactcagaaaggtaacctcctccgccacattaaactg

SEQ ID NO: 164 - DNA, 66 bp, Synthetic construct
  source 1..66: mol_type = other DNA
ttcttatgtcccatctgtggggcaccctttactcagaaaggtaacctcctccgccacattaaactg

SEQ ID NO: 165 - DNA, 66 bp, Synthetic construct
  source 1..66: mol_type = other DNA
ttggtgtgccccatatgtgggttcgggtgtactcagaaaggtaacctcctccgccacattaaactg

SEQ ID NO: 166 - DNA, 66 bp, Synthetic construct
  source 1..66: mol_type = other DNA
ttccagtgcccaatctgcggccgaatctttactcagaaaggtaacctcctccgccacattaaactg

SEQ ID NO: 167 - DNA, 66 bp, Synthetic construct
  source 1..66: mol_type = other DNA
ttccagtgtcctcagtgtggggcaacatttactcagaaaggtaacctcctccgccacattaaactg

SEQ ID NO: 168 - DNA, 66 bp, Synthetic construct
  source 1..66: mol_type = other DNA
ttccagtgtgaaatctgtggggcacattttactcagaaaggtaacctcctccgccacattaaactg

SEQ ID NO: 169 - DNA, 66 bp, Synthetic construct
  source 1..66: mol_type = other DNA
cttcagtgcgagatatgcggatttatgtgcactcagaaaggtaacctcctccgccacattaaactg

SEQ ID NO: 170 - DNA, 66 bp, Synthetic construct
  source 1..66: mol_type = other DNA
ttcacgtgtgagatctgtggggcaccctttactcagaaaggtaacctcctccgccacattaaactg

SEQ ID NO: 171 - DNA, 66 bp, Synthetic construct
  source 1..66: mol_type = other DNA
ctggagtgtcccatctgcgggttcgcttgcactcagaaaggtaacctcctccgccacattaaactg

SEQ ID NO: 172 - DNA, 66 bp, Synthetic construct
  source 1..66: mol_type = other DNA
ttccagtgtgatatttgtggggcagtatttactcagaaaggtaacctcctccgccacattaaactg

SEQ ID NO: 173 - DNA, 66 bp, Synthetic construct
  source 1..66: mol_type = other DNA
ttcatctgtgaggtgtgtggggcaccatttactcagaaaggtaacctcctccgccacattaaactg

SEQ ID NO: 174 - DNA, 66 bp, Synthetic construct
  source 1..66: mol_type = other DNA
ttcctgtgtgaaatctgtggggcaccatttactcagaaaggtaacctcctccgccacattaaactg

SEQ ID NO: 175 - DNA, 66 bp, Synthetic construct
  source 1..66: mol_type = other DNA
ttcgaatgtccggtttgtggggcaaattttactcagaaaggtaacctcctccgccacattaaactg

SEQ ID NO: 176 - DNA, 66 bp, Synthetic construct
  source 1..66: mol_type = other DNA
ttcatttgtgaaatttgtggggcacaatttactcagaaaggtaacctcctccgccacattaaactg

SEQ ID NO: 177 - DNA, 66 bp, Synthetic construct
  source 1..66: mol_type = other DNA
ttcatctgtcctatttgtggggcaccttttactcagaaaggtaacctcctccgccacattaaactg

SEQ ID NO: 178 - DNA, 66 bp, Synthetic construct
  source 1..66: mol_type = other DNA
ttagaatgccctatctgcggtttccaatgcactcagaaaggtaacctcctccgccacattaaactg

SEQ ID NO: 179 - DNA, 66 bp, Synthetic construct
  source 1..66: mol_type = other DNA
ttccagtgtgatgtttgtggggcaacttttactcagaaaggtaacctcctccgccacattaaactg

SEQ ID NO: 180 - DNA, 66 bp, Synthetic construct
  source 1..66: mol_type = other DNA
ttcgtgtgtgaaatctgtggggcagcatttactcagaaaggtaacctcctccgccacattaaactg

SEQ ID NO: 181 - DNA, 66 bp, Synthetic construct
  source 1..66: mol_type = other DNA
ctcgagtgcgaaatttgtggattccggtgcactcagaaaggtaacctcctccgccacattaaactg

SEQ ID NO: 182 - DNA, 66 bp, Synthetic construct
  source 1..66: mol_type = other DNA
ctgacctgcgaaatctgcggatttacttgcactcagaaaggtaacctcctccgccacattaaactg

SEQ ID NO: 183 - DNA, 66 bp, Synthetic construct
  source 1..66: mol_type = other DNA
ttacaatgtcctatctgcggatttttttgtactcagaaaggtaacctcctccgccacattaaactg

SEQ ID NO: 184 - DNA, 66 bp, Synthetic construct
  source 1..66: mol_type = other DNA
ctcatctgcgagatctgtggattcacctgtactcagaaaggtaacctcctccgccacattaaactg

SEQ ID NO: 185 - DNA, 66 bp, Synthetic construct
  source 1..66: mol_type = other DNA
ctggtgtgtgaaatatgcggcttccaatgtactcagaaaggtaacctcctccgccacattaaactg

SEQ ID NO: 186 - DNA, 66 bp, Synthetic construct
  source 1..66: mol_type = other DNA
ctgcagtgcgaaatttgtggcttctgctgtactcagaaaggtaacctcctccgccacattaaactg

SEQ ID NO: 187 - DNA, 66 bp, Synthetic construct
  source 1..66: mol_type = other DNA
ttcacatgtgaagtgtgtggggcatcgtttactcagaaaggtaacctcctccgccacattaaactg

SEQ ID NO: 188 - DNA, 66 bp, Synthetic construct
  source 1..66: mol_type = other DNA
ctgcaatgccctatttgtggctttccgtgcactcagaaaggtaacctcctccgccacattaaactg

SEQ ID NO: 189 - DNA, 66 bp, Synthetic construct
  source 1..66: mol_type = other DNA
ctctgctgccccatctgtggtttcagttgcactcagaaaggtaacctcctccgccacattaaactg

SEQ ID NO: 190 - DNA, 66 bp, Synthetic construct
  source 1..66: mol_type = other DNA
ttcgagtgtccaatctgtggggcagcgtttactcagaaaggtaacctcctccgccacattaaactg

SEQ ID NO: 191 - DNA, 66 bp, Synthetic construct
  source 1..66: mol_type = other DNA
ttccagtgtgagcagtgtggggcaacctttactcagaaaggtaacctcctccgccacattaaactg

SEQ ID NO: 192 - DNA, 66 bp, Synthetic construct
  source 1..66: mol_type = other DNA
ttccagtgtaacgtgtgtggggcagcatttactcagaaaggtaacctcctccgccacattaaactg

SEQ ID NO: 193 - DNA, 66 bp, Synthetic construct
  source 1..66: mol_type = other DNA
ttccaatgtgaagtgtgtggggcagactttactcagaaaggtaacctcctccgccacattaaactg

SEQ ID NO: 194 - DNA, 66 bp, Synthetic construct
  source 1..66: mol_type = other DNA
ttagtgtgcgagatttgtgggttcgcctgcactcagaaaggtaacctcctccgccacattaaactg

SEQ ID NO: 195 - DNA, 66 bp, Synthetic construct
  source 1..66: mol_type = other DNA
ctggtctgccctatctgcgggtttcagtgcactcagaaaggtaacctcctccgccacattaaactg

SEQ ID NO: 196 - DNA, 66 bp, Synthetic construct
  source 1..66: mol_type = other DNA
ttccagtgtgaaatctgtggggcaggctttactcagaaaggtaacctcctccgccacattaaactg

SEQ ID NO: 197 - DNA, 66 bp, Synthetic construct
  source 1..66: mol_type = other DNA
ttcatttgtgaaatctgtggggcagcatttactcagaaaggtaacctcctccgccacattaaactg

SEQ ID NO: 198 - DNA, 66 bp, Synthetic construct
  source 1..66: mol_type = other DNA
ttccaatgtaacatttgtggggcatattttactcagaaaggtaacctcctccgccacattaaactg

SEQ ID NO: 199 - DNA, 66 bp, Synthetic construct
  source 1..66: mol_type = other DNA
ttccagtgtaacatatgtggggcaaattttactcagaaaggtaacctcctccgccacattaaactg

SEQ ID NO: 200 - DNA, 66 bp, Synthetic construct
  source 1..66: mol_type = other DNA
ttcgtctgtcctatctgtggggcaagttttactcagaaaggtaacctcctccgccacattaaactg

SEQ ID NO: 201 - DNA, 66 bp, Synthetic construct
  source 1..66: mol_type = other DNA
ttcatctgtccagtctgtggggcaccctttactcagaaaggtaacctcctccgccacattaaactg

SEQ ID NO: 202 - DNA, 66 bp, Synthetic construct
  source 1..66: mol_type = other DNA
ttctgctgtgaaatatgtggggcacgttttactcagaaaggtaacctcctccgccacattaaactg

SEQ ID NO: 203 - DNA, 66 bp, Synthetic construct
  source 1..66: mol_type = other DNA
ttcgtgtgtcctgtctgtggggcagcgtttactcagaaaggtaacctcctccgccacattaaactg

SEQ ID NO: 204 - DNA, 66 bp, Synthetic construct
  source 1..66: mol_type = other DNA
ttcgtgtgtgagatatgtggggcacgctttactcagaaaggtaacctcctccgccacattaaactg

SEQ ID NO: 205 - DNA, 66 bp, Synthetic construct
  source 1..66: mol_type = other DNA
ttcgtttgtgagatctgtggggcaaaatttactcagaaaggtaacctcctccgccacattaaactg

SEQ ID NO: 206 - DNA, 66 bp, Synthetic construct
  source 1..66: mol_type = other DNA
ctcatctgtcctatctgcgggtttggatgcactcagaaaggtaacctcctccgccacattaaactg

SEQ ID NO: 207 - DNA, 66 bp, Synthetic construct
  source 1..66: mol_type = other DNA
ttcgtgtgtgaggtgtgtggggcaccttttactcagaaaggtaacctcctccgccacattaaactg

SEQ ID NO: 208 - DNA, 66 bp, Synthetic construct
  source 1..66: mol_type = other DNA
ttcacctgtccaatctgtggggcacagtttactcagaaaggtaacctcctccgccacattaaactg

SEQ ID NO: 209 - DNA, 66 bp, Synthetic construct
  source 1..66: mol_type = other DNA
ttccagtgtgaggtttgtggggcacactttactcagaaaggtaacctcctccgccacattaaactg

SEQ ID NO: 210 - DNA, 66 bp, Synthetic construct
  source 1..66: mol_type = other DNA
ttcacatgtgaagtgtgtggggcagcttttactcagaaaggtaacctcctccgccacattaaactg

SEQ ID NO: 211 - DNA, 66 bp, Synthetic construct
  source 1..66: mol_type = other DNA
ttcatatgtgaggtctgtggggcagcgtttactcagaaaggtaacctcctccgccacattaaactg

SEQ ID NO: 212 - DNA, 66 bp, Synthetic construct
  source 1..66: mol_type = other DNA
ttcatctgtgagatttgtggggcacgttttactcagaaaggtaacctcctccgccacattaaactg

SEQ ID NO: 213 - DNA, 66 bp, Synthetic construct
  source 1..66: mol_type = other DNA
ttcgtgtgtccgatctgtggggcagcgtttactcagaaaggtaacctcctccgccacattaaactg

SEQ ID NO: 214 - DNA, 66 bp, Synthetic construct
  source 1..66: mol_type = other DNA
ttccagtgtgaacagtgtggggcaagatttactcagaaaggtaacctcctccgccacattaaactg

SEQ ID NO: 215 - DNA, 66 bp, Synthetic construct
  source 1..66: mol_type = other DNA
ttcacttgtcccgtctgtggggcaccgtttactcagaaaggtaacctcctccgccacattaaactg

SEQ ID NO: 216 - DNA, 66 bp, Synthetic construct
  source 1..66: mol_type = other DNA
ttcacgtgtccgatttgtggggcatgttttactcagaaaggtaacctcctccgccacattaaactg

SEQ ID NO: 217 - DNA, 66 bp, Synthetic construct
  source 1..66: mol_type = other DNA
ttccaatgtgacatttgtggggcacgctttactcagaaaggtaacctcctccgccacattaaactg

SEQ ID NO: 218 - DNA, 66 bp, Synthetic construct
  source 1..66: mol_type = other DNA
ctaacctgcccaatctgcgggttcgcttgtactcagaaaggtaacctcctccgccacattaaactg

SEQ ID NO: 219 - DNA, 66 bp, Synthetic construct
  source 1..66: mol_type = other DNA
ttccaatgtgaacagtgtggggcatgttttactcagaaaggtaacctcctccgccacattaaactg

SEQ ID NO: 220 - DNA, 66 bp, Synthetic construct
  source 1..66: mol_type = other DNA
ttcacgtgtgaaatttgtggggcagcttttactcagaaaggtaacctcctccgccacattaaactg

SEQ ID NO: 221 - DNA, 66 bp, Synthetic construct
  source 1..66: mol_type = other DNA
ctgatctgtgaaatttgtggattccggtgcactcagaaaggtaacctcctccgccacattaaactg

SEQ ID NO: 222 - DNA, 66 bp, Synthetic construct
  source 1..66: mol_type = other DNA
ttccagtgtgatgtatgtggggcagtttttactcagaaaggtaacctcctccgccacattaaactg

SEQ ID NO: 223 - DNA, 66 bp, Synthetic construct
  source 1..66: mol_type = other DNA
ttccagtgtgatgtgtgtggggcatgctttactcagaaaggtaacctcctccgccacattaaactg

SEQ ID NO: 224 - DNA, 66 bp, Synthetic construct
  source 1..66: mol_type = other DNA
ttccagtgtgagcagtgtggggcagcttttactcagaaaggtaacctcctccgccacattaaactg

SEQ ID NO: 225 - DNA, 66 bp, Synthetic construct
  source 1..66: mol_type = other DNA
ttccaatgtgatatttgtggggcagcctttactcagaaaggtaacctcctccgccacattaaactg

SEQ ID NO: 226 - DNA, 66 bp, Synthetic construct
  source 1..66: mol_type = other DNA
ttcacgtgtcccatatgtggggcacgctttactcagaaaggtaacctcctccgccacattaaactg

SEQ ID NO: 227 - DNA, 66 bp, Synthetic construct
  source 1..66: mol_type = other DNA
ttcgaatgtccaatctgtggggcaaagtttactcagaaaggtaacctcctccgccacattaaactg

SEQ ID NO: 228 - DNA, 66 bp, Synthetic construct
  source 1..66: mol_type = other DNA
ttcacatgtgaaatatgtggggcaagttttactcagaaaggtaacctcctccgccacattaaactg

SEQ ID NO: 229 - DNA, 66 bp, Synthetic construct
  source 1..66: mol_type = other DNA
ttcacctgtcccgtgtgtggggcagcatttactcagaaaggtaacctcctccgccacattaaactg

SEQ ID NO: 230 - DNA, 66 bp, Synthetic construct
  source 1..66: mol_type = other DNA
ttccagtgtgagatttgtggggcagattttactcagaaaggtaacctcctccgccacattaaactg

SEQ ID NO: 231 - DNA, 66 bp, Synthetic construct
  source 1..66: mol_type = other DNA
ttcgtgtgtgaaatctgtggggcaagctttactcagaaaggtaacctcctccgccacattaaactg

SEQ ID NO: 232 - DNA, 66 bp, Synthetic construct
  source 1..66: mol_type = other DNA
ttcgaatgtcctgtatgtggggcagcatttactcagaaaggtaacctcctccgccacattaaactg

SEQ ID NO: 233 - DNA, 66 bp, Synthetic construct
  source 1..66: mol_type = other DNA
ctaatctgtgagatatgcggctttcagtgcactcagaaaggtaacctcctccgccacattaaactg

SEQ ID NO: 234 - DNA, 66 bp, Synthetic construct
  source 1..66: mol_type = other DNA
ttaacttgccccatttgtggcttctgctgcactcagaaaggtaacctcctccgccacattaaactg

SEQ ID NO: 235 - DNA, 66 bp, Synthetic construct
  source 1..66: mol_type = other DNA
ttcgtttgtgaagtgtgtggggcacaatttactcagaaaggtaacctcctccgccacattaaactg

SEQ ID NO: 236 - DNA, 66 bp, Synthetic construct
  source 1..66: mol_type = other DNA
ttccaatgtgacatctgtggggcatcatttactcagaaaggtaacctcctccgccacattaaactg

SEQ ID NO: 237 - DNA, 66 bp, Synthetic construct
  source 1..66: mol_type = other DNA
ctaagatgtgaaatctgcggctttagttgcactcagaaaggtaacctcctccgccacattaaactg

SEQ ID NO: 238 - DNA, 66 bp, Synthetic construct
  source 1..66: mol_type = other DNA
ttcgagtgtccagtgtgtggggcagtgtttactcagaaaggtaacctcctccgccacattaaactg

SEQ ID NO: 239 - DNA, 66 bp, Synthetic construct
  source 1..66: mol_type = other DNA
ttcacttgtgaaatttgtggggcaacctttactcagaaaggtaacctcctccgccacattaaactg

SEQ ID NO: 240 - DNA, 66 bp, Synthetic construct
  source 1..66: mol_type = other DNA
ttccagtgtccccaatgtggggcacgctttactcagaaaggtaacctcctccgccacattaaactg

SEQ ID NO: 241 - DNA, 66 bp, Synthetic construct
  source 1..66: mol_type = other DNA
ctagtgtgtccgatctgtggctttgaatgtactcagaaaggtaacctcctccgccacattaaactg

SEQ ID NO: 242 - DNA, 66 bp, Synthetic construct
  source 1..66: mol_type = other DNA
ttcgagtgtcctatctgtggggcaccttttactcagaaaggtaacctcctccgccacattaaactg

SEQ ID NO: 243 - DNA, 66 bp, Synthetic construct
  source 1..66: mol_type = other DNA
ttcgtctgtccaatatgtggggcaggctttactcagaaaggtaacctcctccgccacattaaactg

SEQ ID NO: 244 - DNA, 66 bp, Synthetic construct
  source 1..66: mol_type = other DNA
ctttgctgtgagatctgtggttttacatgtactcagaaaggtaacctcctccgccacattaaactg

SEQ ID NO: 245 - DNA, 66 bp, Synthetic construct
  source 1..66: mol_type = other DNA
ttccagtgtccagtctgtggggcatattttactcagaaaggtaacctcctccgccacattaaactg

SEQ ID NO: 246 - DNA, 66 bp, Synthetic construct
  source 1..66: mol_type = other DNA
ttcgtctgtcctgtgtgtggggcacagtttactcagaaaggtaacctcctccgccacattaaactg

SEQ ID NO: 247 - DNA, 66 bp, Synthetic construct
  source 1..66: mol_type = other DNA
ttcatgtgtcccatatgtggggcaccctttactcagaaaggtaacctcctccgccacattaaactg

SEQ ID NO: 248 - DNA, 66 bp, Synthetic construct
  source 1..66: mol_type = other DNA
ttcctctgtgaagtctgtggggcaccctttactcagaaaggtaacctcctccgccacattaaactg

SEQ ID NO: 249 - DNA, 66 bp, Synthetic construct
  source 1..66: mol_type = other DNA
ttcatttgtccaatttgtggggcacagtttactcagaaaggtaacctcctccgccacattaaactg

SEQ ID NO: 250 - DNA, 66 bp, Synthetic construct
  source 1..66: mol_type = other DNA
ctcgtctgccctatatgcggcttctgctgcactcagaaaggtaacctcctccgccacattaaactg

SEQ ID NO: 251 - DNA, 66 bp, Synthetic construct
  source 1..66: mol_type = other DNA
cttatgtgtccaatctgcggttttgcatgtactcagaaaggtaacctcctccgccacattaaactg

SEQ ID NO: 252 - DNA, 66 bp, Synthetic construct
  source 1..66: mol_type = other DNA
ctacaatgtccaatctgcggtttcaattgtactcagaaaggtaacctcctccgccacattaaactg

SEQ ID NO: 253 - DNA, 66 bp, Synthetic construct
  source 1..66: mol_type = other DNA
ttcaggtgtccaatatgtgggcggccgttcactcagaaaggtaacctcctccgccacattaaactg

SEQ ID NO: 254 - DNA, 66 bp, Synthetic construct
  source 1..66: mol_type = other DNA
ctcatgtgtgagatatgtgggtttacatgtactcagaaaggtaacctcctccgccacattaaactg

SEQ ID NO: 255 - DNA, 66 bp, Synthetic construct
  source 1..66: mol_type = other DNA
ttcatgtgtccagtttgtggggcaccctttactcagaaaggtaacctcctccgccacattaaactg

SEQ ID NO: 256 - DNA, 66 bp, Synthetic construct
  source 1..66: mol_type = other DNA
ttccagtgtgaggtgtgtggggcatactttactcagaaaggtaacctcctccgccacattaaactg

SEQ ID NO: 257 - DNA, 66 bp, Synthetic construct
  source 1..66: mol_type = other DNA
ctggtgtgcgaaatctgcggctttaagtgcactcagaaaggtaacctcctccgccacattaaactg

SEQ ID NO: 258 - DNA, 66 bp, Synthetic construct
  source 1..66: mol_type = other DNA
ttcatatgtgagatttgtggggcatcttttactcagaaaggtaacctcctccgccacattaaactg

SEQ ID NO: 259 - DNA, 66 bp, Synthetic construct
  source 1..66: mol_type = other DNA
ttcacctgtcctatttgtggggcagtgtttactcagaaaggtaacctcctccgccacattaaactg

SEQ ID NO: 260 - DNA, 66 bp, Synthetic construct
  source 1..66: mol_type = other DNA
ttcgtgtgtgaagtctgtggggcaggctttactcagaaaggtaacctcctccgccacattaaactg

SEQ ID NO: 261 - DNA, 66 bp, Synthetic construct
  source 1..66: mol_type = other DNA
ttcacttgtcctgtttgtggggcacgctttactcagaaaggtaacctcctccgccacattaaactg

SEQ ID NO: 262 - DNA, 66 bp, Synthetic construct
  source 1..66: mol_type = other DNA
ttcatatgtgaggtctgtggggcatcgtttactcagaaaggtaacctcctccgccacattaaactg

SEQ ID NO: 263 - DNA, 66 bp, Synthetic construct
  source 1..66: mol_type = other DNA
ttccagtgtccacagtgtggggcaatctttactcagaaaggtaacctcctccgccacattaaactg

SEQ ID NO: 264 - DNA, 66 bp, Synthetic construct
  source 1..66: mol_type = other DNA
ttcatgtgtgagatttgtggggcaccatttactcagaaaggtaacctcctccgccacattaaactg

SEQ ID NO: 265 - DNA, 66 bp, Synthetic construct
  source 1..66: mol_type = other DNA
ttcacatgtcctgtgtgtggggcatactttactcagaaaggtaacctcctccgccacattaaactg

SEQ ID NO: 266 - DNA, 66 bp, Synthetic construct
  source 1..66: mol_type = other DNA
ctgtgctgtcctatatgcggatttaggtgcactcagaaaggtaacctcctccgccacattaaactg

SEQ ID NO: 267 - DNA, 66 bp, Synthetic construct
  source 1..66: mol_type = other DNA
ctgatttgcccaatctgtggctttcagtgtactcagaaaggtaacctcctccgccacattaaactg

SEQ ID NO: 268 - DNA, 66 bp, Synthetic construct
  source 1..66: mol_type = other DNA
ttcgagtgtccaatctgtggggcatgctttactcagaaaggtaacctcctccgccacattaaactg

SEQ ID NO: 269 - DNA, 66 bp, Synthetic construct
  source 1..66: mol_type = other DNA
ttcgaatgtccggtgtgtggggcaaggtttactcagaaaggtaacctcctccgccacattaaactg

SEQ ID NO: 270 - DNA, 66 bp, Synthetic construct
  source 1..66: mol_type = other DNA
ttggcgtgtccaatttgcggattctcatgtactcagaaaggtaacctcctccgccacattaaactg

SEQ ID NO: 271 - DNA, 66 bp, Synthetic construct
  source 1..66: mol_type = other DNA
ctgtcttgtcctatctgtggtttctattgcactcagaaaggtaacctcctccgccacattaaactg

SEQ ID NO: 272 - DNA, 66 bp, Synthetic construct
  source 1..66: mol_type = other DNA
ttccagtgtgagcagtgtggggcagtctttactcagaaaggtaacctcctccgccacattaaactg

SEQ ID NO: 273 - DNA, 66 bp, Synthetic construct
  source 1..66: mol_type = other DNA
ctcacctgccctatatgcggttttcgctgcactcagaaaggtaacctcctccgccacattaaactg

SEQ ID NO: 274 - DNA, 66 bp, Synthetic construct
  source 1..66: mol_type = other DNA
ttcacctgtgagatttgtggggcacaatttactcagaaaggtaacctcctccgccacattaaactg

SEQ ID NO: 275 - DNA, 66 bp, Synthetic construct
  source 1..66: mol_type = other DNA
tttcagtgtcccatttgtggcaggccttttactcagaaaggtaacctcctccgccacattaaactg

SEQ ID NO: 276 - DNA, 66 bp, Synthetic construct
  source 1..66: mol_type = other DNA
ttccagtgtgatatctgtggggcaatgtttactcagaaaggtaacctcctccgccacattaaactg

SEQ ID NO: 277 - DNA, 66 bp, Synthetic construct
  source 1..66: mol_type = other DNA
ttccagtgtaatatttgtggggcaatgtttactcagaaaggtaacctcctccgccacattaaactg

SEQ ID NO: 278 - DNA, 66 bp, Synthetic construct
  source 1..66: mol_type = other DNA
ttcgagtgtcccgtttgtggggcacaatttactcagaaaggtaacctcctccgccacattaaactg

SEQ ID NO: 279 - DNA, 66 bp, Synthetic construct
  source 1..66: mol_type = other DNA
ttcgagtgtcccatctgtggggcaacctttactcagaaaggtaacctcctccgccacattaaactg

SEQ ID NO: 280 - DNA, 66 bp, Synthetic construct
  source 1..66: mol_type = other DNA
ttcgaatgtcccgtgtgtggggcaagctttactcagaaaggtaacctcctccgccacattaaactg

SEQ ID NO: 281 - DNA, 66 bp, Synthetic construct
  source 1..66: mol_type = other DNA
ttctgttgtgaggtgtgtggggcacgttttactcagaaaggtaacctcctccgccacattaaactg

SEQ ID NO: 282 - DNA, 66 bp, Synthetic construct
  source 1..66: mol_type = other DNA
ttccagtgtgatatttgtggggcacagtttactcagaaaggtaacctcctccgccacattaaactg

SEQ ID NO: 283 - DNA, 66 bp, Synthetic construct
  source 1..66: mol_type = other DNA
ttcacgtgtccagtgtgtggggcagtctttactcagaaaggtaacctcctccgccacattaaactg

SEQ ID NO: 284 - DNA, 66 bp, Synthetic construct
  source 1..66: mol_type = other DNA
cttgcatgcccgatctgcggcttttactgtactcagaaaggtaacctcctccgccacattaaactg

SEQ ID NO: 285 - DNA, 66 bp, Synthetic construct
  source 1..66: mol_type = other DNA
ttcgaatgtcccatctgtggggcaatctttactcagaaaggtaacctcctccgccacattaaactg

SEQ ID NO: 286 - DNA, 66 bp, Synthetic construct
  source 1..66: mol_type = other DNA
ctcacttgtccgatttgcggtttcggatgtactcagaaaggtaacctcctccgccacattaaactg

SEQ ID NO: 287 - DNA, 66 bp, Synthetic construct
  source 1..66: mol_type = other DNA
ttccaatgtgatgtgtgtggggcaagttttactcagaaaggtaacctcctccgccacattaaactg

SEQ ID NO: 288 - DNA, 66 bp, Synthetic construct
  source 1..66: mol_type = other DNA
ttcagatgtgacgtttgtggggcaccgtttactcagaaaggtaacctcctccgccacattaaactg

SEQ ID NO: 289 - DNA, 66 bp, Synthetic construct
  source 1..66: mol_type = other DNA
ttcacatgtccaatctgtggggcaacctttactcagaaaggtaacctcctccgccacattaaactg

SEQ ID NO: 290 - DNA, 66 bp, Synthetic construct
  source 1..66: mol_type = other DNA
ttccaatgtaatgtttgtggggcaagttttactcagaaaggtaacctcctccgccacattaaactg

SEQ ID NO: 291 - DNA, 66 bp, Synthetic construct
  source 1..66: mol_type = other DNA
tttcagtgtccgatctgtggtcgagtctttactcagaaaggtaacctcctccgccacattaaactg

SEQ ID NO: 292 - DNA, 66 bp, Synthetic construct
  source 1..66: mol_type = other DNA
ctgacgtgccctatttgtggcttccagtgtactcagaaaggtaacctcctccgccacattaaactg

SEQ ID NO: 293 - DNA, 66 bp, Synthetic construct
  source 1..66: mol_type = other DNA
ttcgagtgtcctatctgtggggcacaatttactcagaaaggtaacctcctccgccacattaaactg

SEQ ID NO: 294 - DNA, 66 bp, Synthetic construct
  source 1..66: mol_type = other DNA
ttcaagtgtcctatctgtggggcaccttttactcagaaaggtaacctcctccgccacattaaactg

SEQ ID NO: 295 - DNA, 66 bp, Synthetic construct
  source 1..66: mol_type = other DNA
ctaatctgtccaatctgcgggtttgcatgcactcagaaaggtaacctcctccgccacattaaactg

SEQ ID NO: 296 - DNA, 66 bp, Synthetic construct
  source 1..66: mol_type = other DNA
ttccagtgtgatgtctgtggggcaatatttactcagaaaggtaacctcctccgccacattaaactg

SEQ ID NO: 297 - DNA, 66 bp, Synthetic construct
  source 1..66: mol_type = other DNA
ttccagtgtgatgtgtgtggggcaaaatttactcagaaaggtaacctcctccgccacattaaactg

SEQ ID NO: 298 - DNA, 66 bp, Synthetic construct
  source 1..66: mol_type = other DNA
ttccagtgtcctatttgtggggcatggtttactcagaaaggtaacctcctccgccacattaaactg

SEQ ID NO: 299 - DNA, 66 bp, Synthetic construct
  source 1..66: mol_type = other DNA
ctagaatgcgagatctgcggtttcacctgtactcagaaaggtaacctcctccgccacattaaactg

SEQ ID NO: 300 - DNA, 66 bp, Synthetic construct
  source 1..66: mol_type = other DNA
ttcgagtgtccaatttgtggggcatactttactcagaaaggtaacctcctccgccacattaaactg

SEQ ID NO: 301 - DNA, 66 bp, Synthetic construct
  source 1..66: mol_type = other DNA
ttcacatgtgaaatttgtggggcatgctttactcagaaaggtaacctcctccgccacattaaactg

SEQ ID NO: 302 - DNA, 66 bp, Synthetic construct
  source 1..66: mol_type = other DNA
ctcacctgtcccatttgtggctttaactgtactcagaaaggtaacctcctccgccacattaaactg

SEQ ID NO: 303 - DNA, 66 bp, Synthetic construct
  source 1..66: mol_type = other DNA
ttcacatgtgaaatctgtggggcatactttactcagaaaggtaacctcctccgccacattaaactg

SEQ ID NO: 304 - DNA, 66 bp, Synthetic construct
  source 1..66: mol_type = other DNA
ttccagtgtcctcaatgtggggcaaaatttactcagaaaggtaacctcctccgccacattaaactg

SEQ ID NO: 305 - DNA, 66 bp, Synthetic construct
  source 1..66: mol_type = other DNA
ttcacatgtcctatatgtggggcaaattttactcagaaaggtaacctcctccgccacattaaactg

SEQ ID NO: 306 - DNA, 66 bp, Synthetic construct
  source 1..66: mol_type = other DNA
ctggtgtgtcctatttgtggcttttactgcactcagaaaggtaacctcctccgccacattaaactg

SEQ ID NO: 307 - DNA, 66 bp, Synthetic construct
  source 1..66: mol_type = other DNA
ctggagtgtccaatctgcggttttcattgcactcagaaaggtaacctcctccgccacattaaactg

SEQ ID NO: 308 - DNA, 66 bp, Synthetic construct
  source 1..66: mol_type = other DNA
ctggagtgtcccatctgcgggttttgctgtactcagaaaggtaacctcctccgccacattaaactg

SEQ ID NO: 309 - DNA, 66 bp, Synthetic construct
  source 1..66: mol_type = other DNA
ctggaatgtcctatttgtggctttgtctgtactcagaaaggtaacctcctccgccacattaaactg

SEQ ID NO: 310 - DNA, 66 bp, Synthetic construct
  source 1..66: mol_type = other DNA
ttccagtgtgacgtctgtggggcagcctttactcagaaaggtaacctcctccgccacattaaactg

SEQ ID NO: 311 - DNA, 66 bp, Synthetic construct
  source 1..66: mol_type = other DNA
ctgatttgccctatctgtggctttcggtgtactcagaaaggtaacctcctccgccacattaaactg

SEQ ID NO: 312 - DNA, 66 bp, Synthetic construct
  source 1..66: mol_type = other DNA
ttccaatgtgagcaatgtggggcatcatttactcagaaaggtaacctcctccgccacattaaactg

SEQ ID NO: 313 - DNA, 66 bp, Synthetic construct
  source 1..66: mol_type = other DNA
ttccagtgtaacgtgtgtggggcacagtttactcagaaaggtaacctcctccgccacattaaactg

SEQ ID NO: 314 - DNA, 66 bp, Synthetic construct
  source 1..66: mol_type = other DNA
ttcgagtgtcctgtatgtggggcaacctttactcagaaaggtaacctcctccgccacattaaactg

SEQ ID NO: 315 - DNA, 66 bp, Synthetic construct
  source 1..66: mol_type = other DNA
ttccagtgtaacatctgtggggcactgtttactcagaaaggtaacctcctccgccacattaaactg

SEQ ID NO: 316 - DNA, 66 bp, Synthetic construct
  source 1..66: mol_type = other DNA
ttcgtctgtccaatctgtggggcaaactttactcagaaaggtaacctcctccgccacattaaactg

SEQ ID NO: 317 - DNA, 66 bp, Synthetic construct
  source 1..66: mol_type = other DNA
ctgatctgtcccatctgtgggtttacctgcactcagaaaggtaacctcctccgccacattaaactg

SEQ ID NO: 318 - DNA, 66 bp, Synthetic construct
  source 1..66: mol_type = other DNA
ttccaatgtccgcagtgtggggcatcctttactcagaaaggtaacctcctccgccacattaaactg

SEQ ID NO: 319 - DNA, 66 bp, Synthetic construct
  source 1..66: mol_type = other DNA
ttccaatgtgatgtctgtggggcacgatttactcagaaaggtaacctcctccgccacattaaactg

SEQ ID NO: 320 - DNA, 66 bp, Synthetic construct
  source 1..66: mol_type = other DNA
ctttcgtgtcccatttgcggtttctcatgcactcagaaaggtaacctcctccgccacattaaactg

SEQ ID NO: 321 - DNA, 66 bp, Synthetic construct
  source 1..66: mol_type = other DNA
ttcgtctgtccagtgtgtggggcaaggtttactcagaaaggtaacctcctccgccacattaaactg

SEQ ID NO: 322 - DNA, 66 bp, Synthetic construct
  source 1..66: mol_type = other DNA
ttcgtgtgtccgatttgtggggcacagtttactcagaaaggtaacctcctccgccacattaaactg

SEQ ID NO: 323 - DNA, 66 bp, Synthetic construct
  source 1..66: mol_type = other DNA
ttccagtgtaacgtttgtggggcaaaatttactcagaaaggtaacctcctccgccacattaaactg

SEQ ID NO: 324 - DNA, 66 bp, Synthetic construct
  source 1..66: mol_type = other DNA
ttcacatgtcccgtgtgtggggcaaactttactcagaaaggtaacctcctccgccacattaaactg

SEQ ID NO: 325 - DNA, 66 bp, Synthetic construct
  source 1..66: mol_type = other DNA
ttcgtgtgtcccgtctgtggggcaggatttactcagaaaggtaacctcctccgccacattaaactg

SEQ ID NO: 326 - DNA, 66 bp, Synthetic construct
  source 1..66: mol_type = other DNA
ttcacctgtccagtttgtggggcaagctttactcagaaaggtaacctcctccgccacattaaactg

SEQ ID NO: 327 - DNA, 66 bp, Synthetic construct
  source 1..66: mol_type = other DNA
cttttctgcgaaatttgtggcttctcctgcactcagaaaggtaacctcctccgccacattaaactg

SEQ ID NO: 328 - DNA, 66 bp, Synthetic construct
  source 1..66: mol_type = other DNA
ctgatgtgtcccatttgcggcttcacctgcactcagaaaggtaacctcctccgccacattaaactg

SEQ ID NO: 329 - DNA, 66 bp, Synthetic construct
  source 1..66: mol_type = other DNA
ttcgtctgtcctgtgtgtggggcatcttttactcagaaaggtaacctcctccgccacattaaactg

SEQ ID NO: 330 - DNA, 66 bp, Synthetic construct
  source 1..66: mol_type = other DNA
ttcacctgtgaggtgtgtggggcacaatttactcagaaaggtaacctcctccgccacattaaactg

SEQ ID NO: 331 - DNA, 66 bp, Synthetic construct
  source 1..66: mol_type = other DNA
ctcacatgcccaatctgtgggttccactgtactcagaaaggtaacctcctccgccacattaaactg

SEQ ID NO: 332 - DNA, 66 bp, Synthetic construct
  source 1..66: mol_type = other DNA
ttcgaatgtcccatatgtggggcagattttactcagaaaggtaacctcctccgccacattaaactg

SEQ ID NO: 333 - DNA, 66 bp, Synthetic construct
  source 1..66: mol_type = other DNA
ttcatttgtcctatatgtggggcagcctttactcagaaaggtaacctcctccgccacattaaactg

SEQ ID NO: 334 - DNA, 66 bp, Synthetic construct
  source 1..66: mol_type = other DNA
ttgttttgtcctatatgcgggttttcatgcactcagaaaggtaacctcctccgccacattaaactg

SEQ ID NO: 335 - DNA, 66 bp, Synthetic construct
  source 1..66: mol_type = other DNA
ctggtctgccccatatgtggttttaagtgcactcagaaaggtaacctcctccgccacattaaactg

SEQ ID NO: 336 - DNA, 66 bp, Synthetic construct
  source 1..66: mol_type = other DNA
ctgtgttgccccatctgtggctttgcatgcactcagaaaggtaacctcctccgccacattaaactg

SEQ ID NO: 337 - DNA, 66 bp, Synthetic construct
  source 1..66: mol_type = other DNA
ttcacctgtgaggtgtgtggggcaaagtttactcagaaaggtaacctcctccgccacattaaactg

SEQ ID NO: 338 - DNA, 66 bp, Synthetic construct
  source 1..66: mol_type = other DNA
ttcagatgtaatgtttgtggggcaccatttactcagaaaggtaacctcctccgccacattaaactg

SEQ ID NO: 339 - DNA, 66 bp, Synthetic construct
  source 1..66: mol_type = other DNA
ttcgtgtgtcctgtgtgtggggcaaattttactcagaaaggtaacctcctccgccacattaaactg

SEQ ID NO: 340 - DNA, 66 bp, Synthetic construct
  source 1..66: mol_type = other DNA
ttcatatgtcccgtatgtggggcagcctttactcagaaaggtaacctcctccgccacattaaactg

SEQ ID NO: 341 - DNA, 66 bp, Synthetic construct
  source 1..66: mol_type = other DNA
ttcgactgtcctatttgtggggcaagatttactcagaaaggtaacctcctccgccacattaaactg

SEQ ID NO: 342 - DNA, 66 bp, Synthetic construct
  source 1..66: mol_type = other DNA
ttcatttgtgaaatctgtggggcagggtttactcagaaaggtaacctcctccgccacattaaactg

SEQ ID NO: 343 - DNA, 66 bp, Synthetic construct
  source 1..66: mol_type = other DNA
ttcatctgtaatatttgtggggcaccctttactcagaaaggtaacctcctccgccacattaaactg

SEQ ID NO: 344 - DNA, 66 bp, Synthetic construct
  source 1..66: mol_type = other DNA
ttcatctgtgaagtgtgtggggcatgttttactcagaaaggtaacctcctccgccacattaaactg

SEQ ID NO: 345 - DNA, 66 bp, Synthetic construct
  source 1..66: mol_type = other DNA
ttcgagtgtcctgtttgtggggcaatctttactcagaaaggtaacctcctccgccacattaaactg

SEQ ID NO: 346 - DNA, 66 bp, Synthetic construct
  source 1..66: mol_type = other DNA
ttcgtgtgtgagatatgtggggcatgctttactcagaaaggtaacctcctccgccacattaaactg

SEQ ID NO: 347 - DNA, 66 bp, Synthetic construct
  source 1..66: mol_type = other DNA
ttcgagtgtcctgtttgtggggcatgctttactcagaaaggtaacctcctccgccacattaaactg

SEQ ID NO: 348 - DNA, 66 bp, Synthetic construct
  source 1..66: mol_type = other DNA
cttatctgcgagatttgtggatttgcgtgtactcagaaaggtaacctcctccgccacattaaactg

SEQ ID NO: 349 - DNA, 66 bp, Synthetic construct
  source 1..66: mol_type = other DNA
tttagatgtccgatttgcggacacccatttactcagaaaggtaacctcctccgccacattaaactg

SEQ ID NO: 350 - DNA, 66 bp, Synthetic construct
  source 1..66: mol_type = other DNA
ttccaatgtaacgtgtgtggggcaacctttactcagaaaggtaacctcctccgccacattaaactg

SEQ ID NO: 351 - DNA, 66 bp, Synthetic construct
  source 1..66: mol_type = other DNA
ctcgtatgcccaatatgcggatttaactgtactcagaaaggtaacctcctccgccacattaaactg

SEQ ID NO: 352 - DNA, 66 bp, Synthetic construct
  source 1..66: mol_type = other DNA
ttcgtgtgtgaagtgtgtggggcaaactttactcagaaaggtaacctcctccgccacattaaactg

SEQ ID NO: 353 - DNA, 66 bp, Synthetic construct
  source 1..66: mol_type = other DNA
ttcgtgtgtgaagtgtgtggggcaaaatttactcagaaaggtaacctcctccgccacattaaactg

SEQ ID NO: 354 - DNA, 66 bp, Synthetic construct
  source 1..66: mol_type = other DNA
ttcatctgtcctgtgtgtggggcacaatttactcagaaaggtaacctcctccgccacattaaactg

SEQ ID NO: 355 - DNA, 66 bp, Synthetic construct
  source 1..66: mol_type = other DNA
ttcacatgtaatatctgtggggcaccctttactcagaaaggtaacctcctccgccacattaaactg

SEQ ID NO: 356 - DNA, 66 bp, Synthetic construct
  source 1..66: mol_type = other DNA
ctcacctgtgaaatttgcggcttccggtgcactcagaaaggtaacctcctccgccacattaaactg

SEQ ID NO: 357 - DNA, 66 bp, Synthetic construct
  source 1..66: mol_type = other DNA
ttggtctgtgagatttgtggcttttattgtactcagaaaggtaacctcctccgccacattaaactg

SEQ ID NO: 358 - DNA, 66 bp, Synthetic construct
  source 1..66: mol_type = other DNA
ttccagtgtgaacaatgtggggcaatctttactcagaaaggtaacctcctccgccacattaaactg

SEQ ID NO: 359 - DNA, 66 bp, Synthetic construct
  source 1..66: mol_type = other DNA
ttcacttgtcctgtgtgtggggcacagtttactcagaaaggtaacctcctccgccacattaaactg

SEQ ID NO: 360 - DNA, 66 bp, Synthetic construct
  source 1..66: mol_type = other DNA
ttccagtgtaacatatgtggggcagactttactcagaaaggtaacctcctccgccacattaaactg

SEQ ID NO: 361 - DNA, 66 bp, Synthetic construct
  source 1..66: mol_type = other DNA
ttccagtgtgacatctgtggggcaaactttactcagaaaggtaacctcctccgccacattaaactg

SEQ ID NO: 362 - DNA, 66 bp, Synthetic construct
  source 1..66: mol_type = other DNA
ctgatatgcgaaatctgcgggtttaaatgcactcagaaaggtaacctcctccgccacattaaactg

SEQ ID NO: 363 - DNA, 66 bp, Synthetic construct
  source 1..66: mol_type = other DNA
ttcacatgtgaggtatgtggggcaccttttactcagaaaggtaacctcctccgccacattaaactg

SEQ ID NO: 364 - DNA, 66 bp, Synthetic construct
  source 1..66: mol_type = other DNA
ttctgctgtgaggtctgtggggcaaaatttactcagaaaggtaacctcctccgccacattaaactg

SEQ ID NO: 365 - DNA, 66 bp, Synthetic construct
  source 1..66: mol_type = other DNA
ttcgtctgtccaatatgtggggcacggtttactcagaaaggtaacctcctccgccacattaaactg

SEQ ID NO: 366 - DNA, 66 bp, Synthetic construct
  source 1..66: mol_type = other DNA
ctgcgctgtcccatatgtggtttcagctgtactcagaaaggtaacctcctccgccacattaaactg

SEQ ID NO: 367 - DNA, 66 bp, Synthetic construct
  source 1..66: mol_type = other DNA
ttcgactgtccagtgtgtggggcacggtttactcagaaaggtaacctcctccgccacattaaactg

SEQ ID NO: 368 - DNA, 66 bp, Synthetic construct
  source 1..66: mol_type = other DNA
ttccagtgtgaaatttgtggggcattttttactcagaaaggtaacctcctccgccacattaaactg

SEQ ID NO: 369 - DNA, 66 bp, Synthetic construct
  source 1..66: mol_type = other DNA
ttcacgtgtccaatctgtggggcaatctttactcagaaaggtaacctcctccgccacattaaactg

SEQ ID NO: 370 - DNA, 66 bp, Synthetic construct
  source 1..66: mol_type = other DNA
ttccagtgtaacgtctgtggggcaaggtttactcagaaaggtaacctcctccgccacattaaactg

SEQ ID NO: 371 - DNA, 66 bp, Synthetic construct
  source 1..66: mol_type = other DNA
ttcacttgtgaaatctgtggggcaaagtttactcagaaaggtaacctcctccgccacattaaactg

SEQ ID NO: 372 - DNA, 66 bp, Synthetic construct
  source 1..66: mol_type = other DNA
ctaacatgccccatatgtggattcttctgcactcagaaaggtaacctcctccgccacattaaactg

SEQ ID NO: 373 - DNA, 66 bp, Synthetic construct
  source 1..66: mol_type = other DNA
ttcgtgtgtgaggtgtgtggggcatgctttactcagaaaggtaacctcctccgccacattaaactg

SEQ ID NO: 374 - DNA, 66 bp, Synthetic construct
  source 1..66: mol_type = other DNA
cttcattgccccatctgcgggttctactgcactcagaaaggtaacctcctccgccacattaaactg

SEQ ID NO: 375 - DNA, 66 bp, Synthetic construct
  source 1..66: mol_type = other DNA
ttccagtgtgagcagtgtggggcaaagtttactcagaaaggtaacctcctccgccacattaaactg

SEQ ID NO: 376 - DNA, 66 bp, Synthetic construct
  source 1..66: mol_type = other DNA
ttcgtttgtgagatttgtggggcaaattttactcagaaaggtaacctcctccgccacattaaactg

SEQ ID NO: 377 - DNA, 66 bp, Synthetic construct
  source 1..66: mol_type = other DNA
ttccaatgtcccgtttgtggggcatggtttactcagaaaggtaacctcctccgccacattaaactg

SEQ ID NO: 378 - DNA, 66 bp, Synthetic construct
  source 1..66: mol_type = other DNA
ttgtactgccctatatgtgggttcagctgcactcagaaaggtaacctcctccgccacattaaactg

SEQ ID NO: 379 - DNA, 66 bp, Synthetic construct
  source 1..66: mol_type = other DNA
ttcatttgtgaggtatgtggggcacagtttactcagaaaggtaacctcctccgccacattaaactg

SEQ ID NO: 380 - DNA, 66 bp, Synthetic construct
  source 1..66: mol_type = other DNA
ctgttttgtcccatctgcgggttcacatgtactcagaaaggtaacctcctccgccacattaaactg

SEQ ID NO: 381 - DNA, 66 bp, Synthetic construct
  source 1..66: mol_type = other DNA
ttccagtgtaatgtgtgtggggcaatgtttactcagaaaggtaacctcctccgccacattaaactg

SEQ ID NO: 382 - DNA, 66 bp, Synthetic construct
  source 1..66: mol_type = other DNA
ttgcaatgtgaaatttgcggttttgaatgcactcagaaaggtaacctcctccgccacattaaactg

SEQ ID NO: 383 - DNA, 66 bp, Synthetic construct
  source 1..66: mol_type = other DNA
ctaatgtgtccaatttgcggtttcagctgtactcagaaaggtaacctcctccgccacattaaactg

SEQ ID NO: 384 - DNA, 66 bp, Synthetic construct
  source 1..66: mol_type = other DNA
ttccagtgtaacgtgtgtggggcaccatttactcagaaaggtaacctcctccgccacattaaactg

SEQ ID NO: 385 - DNA, 66 bp, Synthetic construct
  source 1..66: mol_type = other DNA
ttcgactgtcctatctgcggtcgaaagtttactcagaaaggtaacctcctccgccacattaaactg

SEQ ID NO: 386 - DNA, 66 bp, Synthetic construct
  source 1..66: mol_type = other DNA
ttcatatgtgaggtgtgtggggcaaaatttactcagaaaggtaacctcctccgccacattaaactg

SEQ ID NO: 387 - DNA, 66 bp, Synthetic construct
  source 1..66: mol_type = other DNA
ttcatctgtgaaatctgtggggcaaattttactcagaaaggtaacctcctccgccacattaaactg

SEQ ID NO: 388 - DNA, 66 bp, Synthetic construct
  source 1..66: mol_type = other DNA
ttccaatgtcccatttgtggggcattctttactcagaaaggtaacctcctccgccacattaaactg

SEQ ID NO: 389 - DNA, 66 bp, Synthetic construct
  source 1..66: mol_type = other DNA
ttcacgtgtccaatctgtggggcagcttttactcagaaaggtaacctcctccgccacattaaactg

SEQ ID NO: 390 - DNA, 66 bp, Synthetic construct
  source 1..66: mol_type = other DNA
ttccagtgtccacagtgtggggcacagtttactcagaaaggtaacctcctccgccacattaaactg

SEQ ID NO: 391 - DNA, 66 bp, Synthetic construct
  source 1..66: mol_type = other DNA
ttctgctgtccgatctgtggggcaccttttactcagaaaggtaacctcctccgccacattaaactg

SEQ ID NO: 392 - DNA, 66 bp, Synthetic construct
  source 1..66: mol_type = other DNA
ttcacttgtgaggtctgtggggcatgttttactcagaaaggtaacctcctccgccacattaaactg

SEQ ID NO: 393 - DNA, 66 bp, Synthetic construct
  source 1..66: mol_type = other DNA
ttcgattgcccaatttgcggacgtcgcttcactcagaaaggtaacctcctccgccacattaaactg

SEQ ID NO: 394 - DNA, 66 bp, Synthetic construct
  source 1..66: mol_type = other DNA
cttacttgtccaatatgtggatttaagtgtactcagaaaggtaacctcctccgccacattaaactg

SEQ ID NO: 395 - DNA, 66 bp, Synthetic construct
  source 1..66: mol_type = other DNA
ctatgttgcgagatctgtggcttccgctgtactcagaaaggtaacctcctccgccacattaaactg

SEQ ID NO: 396 - DNA, 66 bp, Synthetic construct
  source 1..66: mol_type = other DNA
ttcgagtgtccagtatgtggggcaccttttactcagaaaggtaacctcctccgccacattaaactg

SEQ ID NO: 397 - DNA, 66 bp, Synthetic construct
  source 1..66: mol_type = other DNA
ttactgtgtgaaatctgtgggttcacatgcactcagaaaggtaacctcctccgccacattaaactg

SEQ ID NO: 398 - DNA, 66 bp, Synthetic construct
  source 1..66: mol_type = other DNA
ctgttatgccctatctgcggctttacttgtactcagaaaggtaacctcctccgccacattaaactg

SEQ ID NO: 399 - DNA, 66 bp, Synthetic construct
  source 1..66: mol_type = other DNA
ttcgcttgtcccatttgtggggcaccatttactcagaaaggtaacctcctccgccacattaaactg

SEQ ID NO: 400 - DNA, 66 bp, Synthetic construct
  source 1..66: mol_type = other DNA
ttcacatgtgaaatctgtggggcagtttttactcagaaaggtaacctcctccgccacattaaactg

SEQ ID NO: 401 - DNA, 66 bp, Synthetic construct
  source 1..66: mol_type = other DNA
ttcatctgtgagatttgtggggcatgctttactcagaaaggtaacctcctccgccacattaaactg

SEQ ID NO: 402 - DNA, 66 bp, Synthetic construct
  source 1..66: mol_type = other DNA
ctgtgctgtccgatttgtggattctgttgtactcagaaaggtaacctcctccgccacattaaactg

SEQ ID NO: 403 - DNA, 66 bp, Synthetic construct
  source 1..66: mol_type = other DNA
ttcacgtgtcccgtctgtggggcaacctttactcagaaaggtaacctcctccgccacattaaactg

SEQ ID NO: 404 - DNA, 66 bp, Synthetic construct
  source 1..66: mol_type = other DNA
ctctattgtcccatttgtgggttcacttgcactcagaaaggtaacctcctccgccacattaaactg

SEQ ID NO: 405 - DNA, 66 bp, Synthetic construct
  source 1..66: mol_type = other DNA
cttgtatgtccaatctgcggctttatgtgcactcagaaaggtaacctcctccgccacattaaactg

SEQ ID NO: 406 - DNA, 66 bp, Synthetic construct
  source 1..66: mol_type = other DNA
ttcatctgtcctatctgtggggcaaactttactcagaaaggtaacctcctccgccacattaaactg

SEQ ID NO: 407 - DNA, 66 bp, Synthetic construct
  source 1..66: mol_type = other DNA
ttcatctgtcccatttgtggggcacgatttactcagaaaggtaacctcctccgccacattaaactg

SEQ ID NO: 408 - DNA, 66 bp, Synthetic construct
  source 1..66: mol_type = other DNA
ctgatatgtcctatttgcggattcgaatgtactcagaaaggtaacctcctccgccacattaaactg

SEQ ID NO: 409 - DNA, 66 bp, Synthetic construct
  source 1..66: mol_type = other DNA
ttccgatgtgaagtgtgtggggcagcatttactcagaaaggtaacctcctccgccacattaaactg

SEQ ID NO: 410 - DNA, 66 bp, Synthetic construct
  source 1..66: mol_type = other DNA
ttctcatgtcccatctgtggggcaccgtttactcagaaaggtaacctcctccgccacattaaactg

SEQ ID NO: 411 - DNA, 66 bp, Synthetic construct
  source 1..66: mol_type = other DNA
tttcagtgtcccatatgcggacgaatgttcactcagaaaggtaacctcctccgccacattaaactg

SEQ ID NO: 412 - DNA, 66 bp, Synthetic construct
  source 1..66: mol_type = other DNA
ttcgaatgtgaaatatgtggggcaaaatttactcagaaaggtaacctcctccgccacattaaactg

SEQ ID NO: 413 - DNA, 66 bp, Synthetic construct
  source 1..66: mol_type = other DNA
ttcatctgtccagtgtgtggggcatcctttactcagaaaggtaacctcctccgccacattaaactg

SEQ ID NO: 414 - DNA, 66 bp, Synthetic construct
  source 1..66: mol_type = other DNA
ttcacctgtgaagtttgtggggcaacctttactcagaaaggtaacctcctccgccacattaaactg

SEQ ID NO: 415 - DNA, 66 bp, Synthetic construct
  source 1..66: mol_type = other DNA
ttcgagtgtcctgtctgtggggcaaagtttactcagaaaggtaacctcctccgccacattaaactg

SEQ ID NO: 416 - DNA, 66 bp, Synthetic construct
  source 1..66: mol_type = other DNA
ttcatatgtccgatctgtggggcagagtttactcagaaaggtaacctcctccgccacattaaactg

SEQ ID NO: 417 - DNA, 66 bp, Synthetic construct
  source 1..66: mol_type = other DNA
ttcgtctgtgatatttgtggggcaccatttactcagaaaggtaacctcctccgccacattaaactg

SEQ ID NO: 418 - DNA, 66 bp, Synthetic construct
  source 1..66: mol_type = other DNA
ttagcctgtcccatttgcgggtttacatgcactcagaaaggtaacctcctccgccacattaaactg

SEQ ID NO: 419 - DNA, 66 bp, Synthetic construct
  source 1..66: mol_type = other DNA
ttcatttgtgagatctgtggggcaaagtttactcagaaaggtaacctcctccgccacattaaactg

SEQ ID NO: 420 - DNA, 66 bp, Synthetic construct
  source 1..66: mol_type = other DNA
ttcatctgtgaagtctgtggggcacgctttactcagaaaggtaacctcctccgccacattaaactg

SEQ ID NO: 421 - DNA, 66 bp, Synthetic construct
  source 1..66: mol_type = other DNA
ttcatgtgtgaagtctgtggggcaccctttactcagaaaggtaacctcctccgccacattaaactg

SEQ ID NO: 422 - DNA, 66 bp, Synthetic construct
  source 1..66: mol_type = other DNA
ctcacctgcgagatatgcgggtttcagtgcactcagaaaggtaacctcctccgccacattaaactg

SEQ ID NO: 423 - DNA, 66 bp, Synthetic construct
  source 1..66: mol_type = other DNA
ttcatctgtccgatttgtggggcatcctttactcagaaaggtaacctcctccgccacattaaactg

SEQ ID NO: 424 - DNA, 66 bp, Synthetic construct
  source 1..66: mol_type = other DNA
ttcgtgtgtcccatctgtggggcagaatttactcagaaaggtaacctcctccgccacattaaactg

SEQ ID NO: 425 - DNA, 66 bp, Synthetic construct
  source 1..66: mol_type = other DNA
ctcagctgtcctatttgtggatttacctgtactcagaaaggtaacctcctccgccacattaaactg

SEQ ID NO: 426 - DNA, 66 bp, Synthetic construct
  source 1..66: mol_type = other DNA
ttcgaatgtgaagtgtgtggggcaaaatttactcagaaaggtaacctcctccgccacattaaactg

SEQ ID NO: 427 - DNA, 66 bp, Synthetic construct
  source 1..66: mol_type = other DNA
ttcgtctgtcctatctgtggggcatattttactcagaaaggtaacctcctccgccacattaaactg

SEQ ID NO: 428 - DNA, 66 bp, Synthetic construct
  source 1..66: mol_type = other DNA
ttcacctgtgaggtgtgtggggcatattttactcagaaaggtaacctcctccgccacattaaactg

SEQ ID NO: 429 - DNA, 66 bp, Synthetic construct
  source 1..66: mol_type = other DNA
ctgcagtgccccatctgcggtttctggtgcactcagaaaggtaacctcctccgccacattaaactg

SEQ ID NO: 430 - DNA, 66 bp, Synthetic construct
  source 1..66: mol_type = other DNA
ttcgagtgtccagtgtgtggggcatattttactcagaaaggtaacctcctccgccacattaaactg

SEQ ID NO: 431 - DNA, 66 bp, Synthetic construct
  source 1..66: mol_type = other DNA
ttcgagtgtcctatctgtggggcagaatttactcagaaaggtaacctcctccgccacattaaactg

SEQ ID NO: 432 - DNA, 66 bp, Synthetic construct
  source 1..66: mol_type = other DNA
ttatgctgtcccatatgtggattcggctgcactcagaaaggtaacctcctccgccacattaaactg

SEQ ID NO: 433 - DNA, 66 bp, Synthetic construct
  source 1..66: mol_type = other DNA
tttgaatgccctatctgtggccgcagattcactcagaaaggtaacctcctccgccacattaaactg

SEQ ID NO: 434 - DNA, 66 bp, Synthetic construct
  source 1..66: mol_type = other DNA
ttccagtgccccatttgcggtagaaacttcactcagaaaggtaacctcctccgccacattaaactg

SEQ ID NO: 435 - DNA, 66 bp, Synthetic construct
  source 1..66: mol_type = other DNA
ctcagatgtcctatatgtggtttcgcatgcactcagaaaggtaacctcctccgccacattaaactg

SEQ ID NO: 436 - DNA, 66 bp, Synthetic construct
  source 1..66: mol_type = other DNA
ctggtgtgccctatctgtggattccattgcactcagaaaggtaacctcctccgccacattaaactg

SEQ ID NO: 437 - DNA, 66 bp, Synthetic construct
  source 1..66: mol_type = other DNA
ctgcagtgtgaaatttgcgggttttactgcactcagaaaggtaacctcctccgccacattaaactg

SEQ ID NO: 438 - DNA, 66 bp, Synthetic construct
  source 1..66: mol_type = other DNA
ttggagtgtccaatctgtggcttcttttgtactcagaaaggtaacctcctccgccacattaaactg

SEQ ID NO: 439 - DNA, 66 bp, Synthetic construct
  source 1..66: mol_type = other DNA
ctgttctgtgagatttgtggcttcacgtgcactcagaaaggtaacctcctccgccacattaaactg

SEQ ID NO: 440 - DNA, 66 bp, Synthetic construct
  source 1..66: mol_type = other DNA
ctgtgttgcgagatttgcggcttcagttgtactcagaaaggtaacctcctccgccacattaaactg

SEQ ID NO: 441 - DNA, 66 bp, Synthetic construct
  source 1..66: mol_type = other DNA
ttcgattgtcccatctgtggggcacaatttactcagaaaggtaacctcctccgccacattaaactg

SEQ ID NO: 442 - DNA, 66 bp, Synthetic construct
  source 1..66: mol_type = other DNA
ttcatctgtgaggtgtgtggggcaggctttactcagaaaggtaacctcctccgccacattaaactg

SEQ ID NO: 443 - DNA, 66 bp, Synthetic construct
  source 1..66: mol_type = other DNA
ttagactgccctatatgtggattcaggtgcactcagaaaggtaacctcctccgccacattaaactg

SEQ ID NO: 444 - DNA, 66 bp, Synthetic construct
  source 1..66: mol_type = other DNA
ttcgtgtgtgagatttgtggggcatactttactcagaaaggtaacctcctccgccacattaaactg

SEQ ID NO: 445 - DNA, 66 bp, Synthetic construct
  source 1..66: mol_type = other DNA
ttcgagtgtcctatttgtggggcacattttactcagaaaggtaacctcctccgccacattaaactg

SEQ ID NO: 446 - DNA, 66 bp, Synthetic construct
  source 1..66: mol_type = other DNA
ttccaatgtaatgtctgtggggcaaactttactcagaaaggtaacctcctccgccacattaaactg

SEQ ID NO: 447 - DNA, 66 bp, Synthetic construct
  source 1..66: mol_type = other DNA
ttctgctgtcccatttgtggggcacgctttactcagaaaggtaacctcctccgccacattaaactg

SEQ ID NO: 448 - DNA, 66 bp, Synthetic construct
  source 1..66: mol_type = other DNA
ctctgctgccctatctgtggcttcaaatgcactcagaaaggtaacctcctccgccacattaaactg

SEQ ID NO: 449 - DNA, 66 bp, Synthetic construct
  source 1..66: mol_type = other DNA
ttcacatgtcctgtctgtggggcagagtttactcagaaaggtaacctcctccgccacattaaactg

SEQ ID NO: 450 - DNA, 66 bp, Synthetic construct
  source 1..66: mol_type = other DNA
ttcgtgtgtgagatctgtggggcaacttttactcagaaaggtaacctcctccgccacattaaactg

SEQ ID NO: 451 - DNA, 66 bp, Synthetic construct
  source 1..66: mol_type = other DNA
ttacattgcccaatatgtggcttctcctgtactcagaaaggtaacctcctccgccacattaaactg

SEQ ID NO: 452 - DNA, 66 bp, Synthetic construct
  source 1..66: mol_type = other DNA
ttcatctgtgagatatgtggggcagaatttactcagaaaggtaacctcctccgccacattaaactg

SEQ ID NO: 453 - DNA, 66 bp, Synthetic construct
  source 1..66: mol_type = other DNA
cttagctgccccatctgcggtttcgcctgcactcagaaaggtaacctcctccgccacattaaactg

SEQ ID NO: 454 - DNA, 66 bp, Synthetic construct
  source 1..66: mol_type = other DNA
ttcgtctgtccagtgtgtggggcatgttttactcagaaaggtaacctcctccgccacattaaactg

SEQ ID NO: 455 - DNA, 66 bp, Synthetic construct
  source 1..66: mol_type = other DNA
ttcacttgtcctatatgtggggcagactttactcagaaaggtaacctcctccgccacattaaactg

SEQ ID NO: 456 - DNA, 66 bp, Synthetic construct
  source 1..66: mol_type = other DNA
ttctgctgtgagatctgtggggcaaagtttactcagaaaggtaacctcctccgccacattaaactg

SEQ ID NO: 457 - DNA, 66 bp, Synthetic construct
  source 1..66: mol_type = other DNA
ttccaatgtccacagtgtggggcaatgtttactcagaaaggtaacctcctccgccacattaaactg

SEQ ID NO: 458 - DNA, 66 bp, Synthetic construct
  source 1..66: mol_type = other DNA
ttcgtctgtccggtgtgtggggcagagtttactcagaaaggtaacctcctccgccacattaaactg

SEQ ID NO: 459 - DNA, 66 bp, Synthetic construct
  source 1..66: mol_type = other DNA
ttcgagtgtgagatctgtggggcagcgtttactcagaaaggtaacctcctccgccacattaaactg

SEQ ID NO: 460 - DNA, 66 bp, Synthetic construct
  source 1..66: mol_type = other DNA
ctggaatgcgaaatctgcggatttaagtgtactcagaaaggtaacctcctccgccacattaaactg

SEQ ID NO: 461 - DNA, 66 bp, Synthetic construct
  source 1..66: mol_type = other DNA
ctcgtctgtcctatctgcggatttttttgcactcagaaaggtaacctcctccgccacattaaactg

SEQ ID NO: 462 - DNA, 66 bp, Synthetic construct
  source 1..66: mol_type = other DNA
tttcaatgcccaatatgcggaagaaagtttactcagaaaggtaacctcctccgccacattaaactg

SEQ ID NO: 463 - DNA, 66 bp, Synthetic construct
  source 1..66: mol_type = other DNA
ttcacctgtcccatctgtggggcagagtttactcagaaaggtaacctcctccgccacattaaactg

SEQ ID NO: 464 - DNA, 66 bp, Synthetic construct
  source 1..66: mol_type = other DNA
ttcacatgtcctgtctgtggggcaaaatttactcagaaaggtaacctcctccgccacattaaactg

SEQ ID NO: 465 - DNA, 66 bp, Synthetic construct
  source 1..66: mol_type = other DNA
ctgatttgccccatctgcgggttctgctgcactcagaaaggtaacctcctccgccacattaaactg

SEQ ID NO: 466 - DNA, 66 bp, Synthetic construct
  source 1..66: mol_type = other DNA
ttcgaatgtgaagtgtgtggggcagcatttactcagaaaggtaacctcctccgccacattaaactg

SEQ ID NO: 467 - DNA, 66 bp, Synthetic construct
  source 1..66: mol_type = other DNA
ttcaagtgtgaaatctgtggggcaccctttactcagaaaggtaacctcctccgccacattaaactg

SEQ ID NO: 468 - DNA, 66 bp, Synthetic construct
  source 1..66: mol_type = other DNA
ctccaatgcgaaatctgtgggttcctgtgcactcagaaaggtaacctcctccgccacattaaactg

SEQ ID NO: 469 - DNA, 66 bp, Synthetic construct
  source 1..66: mol_type = other DNA
ttcgagtgtgagatctgtggggcacagtttactcagaaaggtaacctcctccgccacattaaactg

SEQ ID NO: 470 - DNA, 66 bp, Synthetic construct
  source 1..66: mol_type = other DNA
ttcagatgtccacagtgtggggcaccatttactcagaaaggtaacctcctccgccacattaaactg

SEQ ID NO: 471 - DNA, 66 bp, Synthetic construct
  source 1..66: mol_type = other DNA
ctactctgtccaatttgcggtttttcatgcactcagaaaggtaacctcctccgccacattaaactg

SEQ ID NO: 472 - DNA, 66 bp, Synthetic construct
  source 1..66: mol_type = other DNA
ttccgatgtgagatatgtggggcagcctttactcagaaaggtaacctcctccgccacattaaactg

SEQ ID NO: 473 - DNA, 66 bp, Synthetic construct
  source 1..66: mol_type = other DNA
ttcctgtgtaatatttgtggggcaccttttactcagaaaggtaacctcctccgccacattaaactg

SEQ ID NO: 474 - DNA, 66 bp, Synthetic construct
  source 1..66: mol_type = other DNA
ctggagtgcccaatctgtggattcaattgcactcagaaaggtaacctcctccgccacattaaactg

SEQ ID NO: 475 - DNA, 66 bp, Synthetic construct
  source 1..66: mol_type = other DNA
ttccaatgtgacgtgtgtggggcaccctttactcagaaaggtaacctcctccgccacattaaactg

SEQ ID NO: 476 - DNA, 66 bp, Synthetic construct
  source 1..66: mol_type = other DNA
ctctgctgtgagatctgtgggtttaaatgtactcagaaaggtaacctcctccgccacattaaactg

SEQ ID NO: 477 - DNA, 66 bp, Synthetic construct
  source 1..66: mol_type = other DNA
ctgtgttgtccgatctgcggctttcagtgcactcagaaaggtaacctcctccgccacattaaactg

SEQ ID NO: 478 - DNA, 66 bp, Synthetic construct
  source 1..66: mol_type = other DNA
ctgctttgtgagatttgcggcttccgttgcactcagaaaggtaacctcctccgccacattaaactg

SEQ ID NO: 479 - DNA, 66 bp, Synthetic construct
  source 1..66: mol_type = other DNA
ttcacctgtccggtttgtggggcaggttttactcagaaaggtaacctcctccgccacattaaactg

SEQ ID NO: 480 - DNA, 66 bp, Synthetic construct
  source 1..66: mol_type = other DNA
ttcatatgtgatatctgtggggcaccatttactcagaaaggtaacctcctccgccacattaaactg

SEQ ID NO: 481 - DNA, 66 bp, Synthetic construct
  source 1..66: mol_type = other DNA
ttgcgctgtcccatatgcggcttcggctgcactcagaaaggtaacctcctccgccacattaaactg

SEQ ID NO: 482 - DNA, 66 bp, Synthetic construct
  source 1..66: mol_type = other DNA
ttcatgtgtgagatctgtggggcagcttttactcagaaaggtaacctcctccgccacattaaactg

SEQ ID NO: 483 - DNA, 66 bp, Synthetic construct
  source 1..66: mol_type = other DNA
ttggagtgtgagatttgcgggttttcctgcactcagaaaggtaacctcctccgccacattaaactg

SEQ ID NO: 484 - DNA, 66 bp, Synthetic construct
  source 1..66: mol_type = other DNA
ctaacctgcgagatatgtgggtttgcatgcactcagaaaggtaacctcctccgccacattaaactg

SEQ ID NO: 485 - DNA, 66 bp, Synthetic construct
  source 1..66: mol_type = other DNA
ttctgctgtgaagtgtgtggggcaacctttactcagaaaggtaacctcctccgccacattaaactg

SEQ ID NO: 486 - DNA, 66 bp, Synthetic construct
  source 1..66: mol_type = other DNA
ttctgctgtgaaatctgtggggcagcctttactcagaaaggtaacctcctccgccacattaaactg

SEQ ID NO: 487 - DNA, 66 bp, Synthetic construct
  source 1..66: mol_type = other DNA
ttcacgtgtccagtgtgtggggcacactttactcagaaaggtaacctcctccgccacattaaactg

SEQ ID NO: 488 - DNA, 66 bp, Synthetic construct
  source 1..66: mol_type = other DNA
tttcagtgtcccatttgcggcaggtcctttactcagaaaggtaacctcctccgccacattaaactg

SEQ ID NO: 489 - DNA, 66 bp, Synthetic construct
  source 1..66: mol_type = other DNA
ctcgcctgcccgatttgcgggttctggtgcactcagaaaggtaacctcctccgccacattaaactg

SEQ ID NO: 490 - DNA, 66 bp, Synthetic construct
  source 1..66: mol_type = other DNA
ttcgtctgtccaatctgtggggcaaagtttactcagaaaggtaacctcctccgccacattaaactg

SEQ ID NO: 491 - DNA, 66 bp, Synthetic construct
  source 1..66: mol_type = other DNA
ctctactgcgagatttgcgggtttagctgcactcagaaaggtaacctcctccgccacattaaactg

SEQ ID NO: 492 - DNA, 66 bp, Synthetic construct
  source 1..66: mol_type = other DNA
ttccagtgtaatgtatgtggggcagaatttactcagaaaggtaacctcctccgccacattaaactg

SEQ ID NO: 493 - DNA, 66 bp, Synthetic construct
  source 1..66: mol_type = other DNA
ttcatttgtgaggtgtgtggggcaaactttactcagaaaggtaacctcctccgccacattaaactg

SEQ ID NO: 494 - DNA, 66 bp, Synthetic construct
  source 1..66: mol_type = other DNA
ctactgtgtcctatctgcggcttcaggtgcactcagaaaggtaacctcctccgccacattaaactg

SEQ ID NO: 495 - DNA, 66 bp, Synthetic construct
  source 1..66: mol_type = other DNA
ctgcactgtgaaatatgcggcttttcatgcactcagaaaggtaacctcctccgccacattaaactg

SEQ ID NO: 496 - DNA, 66 bp, Synthetic construct
  source 1..66: mol_type = other DNA
ttccagtgtaacatatgtggggcaggttttactcagaaaggtaacctcctccgccacattaaactg

SEQ ID NO: 497 - DNA, 66 bp, Synthetic construct
  source 1..66: mol_type = other DNA
ttccagtgtgatatctgtggggcagagtttactcagaaaggtaacctcctccgccacattaaactg

SEQ ID NO: 498 - DNA, 66 bp, Synthetic construct
  source 1..66: mol_type = other DNA
ttctattgtgaaatttgtggggcaccatttactcagaaaggtaacctcctccgccacattaaactg

SEQ ID NO: 499 - DNA, 66 bp, Synthetic construct
  source 1..66: mol_type = other DNA
ctggtgtgcgaaatatgtggcttctgttgcactcagaaaggtaacctcctccgccacattaaactg

SEQ ID NO: 500 - DNA, 66 bp, Synthetic construct
  source 1..66: mol_type = other DNA
ttcacctgtccaatctgtggggcattttttactcagaaaggtaacctcctccgccacattaaactg

SEQ ID NO: 501 - DNA, 66 bp, Synthetic construct
  source 1..66: mol_type = other DNA
ctgctctgtgagatctgtgggttctcctgtactcagaaaggtaacctcctccgccacattaaactg

SEQ ID NO: 502 - DNA, 66 bp, Synthetic construct
  source 1..66: mol_type = other DNA
ttcgagtgtgaaatttgtggggcaaactttactcagaaaggtaacctcctccgccacattaaactg

SEQ ID NO: 503 - DNA, 66 bp, Synthetic construct
  source 1..66: mol_type = other DNA
ttcgaatgtgagatttgtggggcaagctttactcagaaaggtaacctcctccgccacattaaactg

SEQ ID NO: 504 - DNA, 66 bp, Synthetic construct
  source 1..66: mol_type = other DNA
ttcaactgtcctatttgtggggcaccttttactcagaaaggtaacctcctccgccacattaaactg

SEQ ID NO: 505 - DNA, 66 bp, Synthetic construct
  source 1..66: mol_type = other DNA
tttcagtgtcccatttgcggccggacatttactcagaaaggtaacctcctccgccacattaaactg

SEQ ID NO: 506 - DNA, 66 bp, Synthetic construct
  source 1..66: mol_type = other DNA
ctagcttgtccaatctgcggttttgcatgtactcagaaaggtaacctcctccgccacattaaactg

SEQ ID NO: 507 - DNA, 66 bp, Synthetic construct
  source 1..66: mol_type = other DNA
ttcacgtgtgaaatctgtggggcaaattttactcagaaaggtaacctcctccgccacattaaactg

SEQ ID NO: 508 - DNA, 66 bp, Synthetic construct
  source 1..66: mol_type = other DNA
ttgcattgcgaaatatgtggcttcacttgtactcagaaaggtaacctcctccgccacattaaactg

SEQ ID NO: 509 - DNA, 66 bp, Synthetic construct
  source 1..66: mol_type = other DNA
ctccgatgccctatctgtggttttttttgcactcagaaaggtaacctcctccgccacattaaactg

SEQ ID NO: 510 - DNA, 66 bp, Synthetic construct
  source 1..66: mol_type = other DNA
ttcatgtgtaatatttgtggggcaccctttactcagaaaggtaacctcctccgccacattaaactg

SEQ ID NO: 511 - DNA, 66 bp, Synthetic construct
  source 1..66: mol_type = other DNA
ttcacttgtaatatctgtggggcagcctttactcagaaaggtaacctcctccgccacattaaactg

SEQ ID NO: 512 - DNA, 66 bp, Synthetic construct
  source 1..66: mol_type = other DNA
ctggattgcccaatttgcggcttcacctgcactcagaaaggtaacctcctccgccacattaaactg

SEQ ID NO: 513 - DNA, 66 bp, Synthetic construct
  source 1..66: mol_type = other DNA
ctggtctgcgagatctgcggctttggctgcactcagaaaggtaacctcctccgccacattaaactg

SEQ ID NO: 514 - DNA, 66 bp, Synthetic construct
  source 1..66: mol_type = other DNA
ttcacttgtaatatttgtggggcaaggtttactcagaaaggtaacctcctccgccacattaaactg

SEQ ID NO: 515 - DNA, 66 bp, Synthetic construct
  source 1..66: mol_type = other DNA
ttcatgtgtcctatctgtggggcatcttttactcagaaaggtaacctcctccgccacattaaactg

SEQ ID NO: 516 - DNA, 66 bp, Synthetic construct
  source 1..66: mol_type = other DNA
ttcgtgtgtcctatttgtggggcacactttactcagaaaggtaacctcctccgccacattaaactg

SEQ ID NO: 517 - DNA, 66 bp, Synthetic construct
  source 1..66: mol_type = other DNA
ttgatgtgcgagatctgtgggtttagatgtactcagaaaggtaacctcctccgccacattaaactg

SEQ ID NO: 518 - DNA, 66 bp, Synthetic construct
  source 1..66: mol_type = other DNA
ctagtatgtgagatatgtggatttatgtgcactcagaaaggtaacctcctccgccacattaaactg

SEQ ID NO: 519 - DNA, 66 bp, Synthetic construct
  source 1..66: mol_type = other DNA
ttccagtgtgacgtgtgtggggcacagtttactcagaaaggtaacctcctccgccacattaaactg

SEQ ID NO: 520 - DNA, 66 bp, Synthetic construct
  source 1..66: mol_type = other DNA
ttaatttgccctatatgtggttttatgtgcactcagaaaggtaacctcctccgccacattaaactg

SEQ ID NO: 521 - DNA, 66 bp, Synthetic construct
  source 1..66: mol_type = other DNA
cttacttgtcctatttgtggcttcgagtgtactcagaaaggtaacctcctccgccacattaaactg

SEQ ID NO: 522 - DNA, 66 bp, Synthetic construct
  source 1..66: mol_type = other DNA
ttcgagtgtgaaatctgtggggcaatctttactcagaaaggtaacctcctccgccacattaaactg

SEQ ID NO: 523 - DNA, 66 bp, Synthetic construct
  source 1..66: mol_type = other DNA
ctcagatgccccatctgtggtttctattgcactcagaaaggtaacctcctccgccacattaaactg

SEQ ID NO: 524 - DNA, 66 bp, Synthetic construct
  source 1..66: mol_type = other DNA
ttcacttgtcccatctgtggggcaggctttactcagaaaggtaacctcctccgccacattaaactg

SEQ ID NO: 525 - DNA, 66 bp, Synthetic construct
  source 1..66: mol_type = other DNA
ttccagtgtcccgtttgtggggcattttttactcagaaaggtaacctcctccgccacattaaactg

SEQ ID NO: 526 - DNA, 66 bp, Synthetic construct
  source 1..66: mol_type = other DNA
ttcgaatgtgagatctgtggggcagtctttactcagaaaggtaacctcctccgccacattaaactg

SEQ ID NO: 527 - DNA, 66 bp, Synthetic construct
  source 1..66: mol_type = other DNA
ttgatctgtccaatctgcggtttctactgcactcagaaaggtaacctcctccgccacattaaactg

SEQ ID NO: 528 - DNA, 66 bp, Synthetic construct
  source 1..66: mol_type = other DNA
ctgtgctgtcccatctgtgggtttttctgcactcagaaaggtaacctcctccgccacattaaactg

SEQ ID NO: 529 - DNA, 66 bp, Synthetic construct
  source 1..66: mol_type = other DNA
ctctcctgtccaatatgtggctttttttgcactcagaaaggtaacctcctccgccacattaaactg

SEQ ID NO: 530 - DNA, 66 bp, Synthetic construct
  source 1..66: mol_type = other DNA
ttcaaatgtcctgtatgtggggcaccctttactcagaaaggtaacctcctccgccacattaaactg

SEQ ID NO: 531 - DNA, 66 bp, Synthetic construct
  source 1..66: mol_type = other DNA
ttcgtttgtgagatctgtggggcagagtttactcagaaaggtaacctcctccgccacattaaactg

SEQ ID NO: 532 - DNA, 66 bp, Synthetic construct
  source 1..66: mol_type = other DNA
ctgacatgcgagatttgcggcttcaagtgtactcagaaaggtaacctcctccgccacattaaactg

SEQ ID NO: 533 - DNA, 66 bp, Synthetic construct
  source 1..66: mol_type = other DNA
ttcgtgtgtcccatctgtggggcatgttttactcagaaaggtaacctcctccgccacattaaactg

SEQ ID NO: 534 - DNA, 66 bp, Synthetic construct
  source 1..66: mol_type = other DNA
ttcatctgtcccatctgtggggcaggctttactcagaaaggtaacctcctccgccacattaaactg

SEQ ID NO: 535 - DNA, 66 bp, Synthetic construct
  source 1..66: mol_type = other DNA
cttgaatgtcctatctgcggatttatgtgcactcagaaaggtaacctcctccgccacattaaactg

SEQ ID NO: 536 - DNA, 66 bp, Synthetic construct
  source 1..66: mol_type = other DNA
ttctgttgtccaatttgtggggcatcctttactcagaaaggtaacctcctccgccacattaaactg

SEQ ID NO: 537 - DNA, 66 bp, Synthetic construct
  source 1..66: mol_type = other DNA
ctgatgtgcccaatctgtggatttcagtgcactcagaaaggtaacctcctccgccacattaaactg

SEQ ID NO: 538 - DNA, 66 bp, Synthetic construct
  source 1..66: mol_type = other DNA
ttccaatgtgatgtgtgtggggcaatgtttactcagaaaggtaacctcctccgccacattaaactg

SEQ ID NO: 539 - DNA, 66 bp, Synthetic construct
  source 1..66: mol_type = other DNA
ttctgttgtccagtctgtggggcatcctttactcagaaaggtaacctcctccgccacattaaactg

SEQ ID NO: 540 - DNA, 66 bp, Synthetic construct
  source 1..66: mol_type = other DNA
ttcacttgtgaagtgtgtggggcagtctttactcagaaaggtaacctcctccgccacattaaactg

SEQ ID NO: 541 - DNA, 66 bp, Synthetic construct
  source 1..66: mol_type = other DNA
ttcgagtgtcccatatgtggggcaggctttactcagaaaggtaacctcctccgccacattaaactg

SEQ ID NO: 542 - DNA, 66 bp, Synthetic construct
  source 1..66: mol_type = other DNA
ttgatgtgtgaaatttgcggctttagctgcactcagaaaggtaacctcctccgccacattaaactg

SEQ ID NO: 543 - DNA, 66 bp, Synthetic construct
  source 1..66: mol_type = other DNA
ttccagtgtgacatctgtggggcattgtttactcagaaaggtaacctcctccgccacattaaactg

SEQ ID NO: 544 - DNA, 66 bp, Synthetic construct
  source 1..66: mol_type = other DNA
ttccaatgcccaatttgtgggcgcaggttcactcagaaaggtaacctcctccgccacattaaactg

SEQ ID NO: 545 - DNA, 66 bp, Synthetic construct
  source 1..66: mol_type = other DNA
ttctgttgtgaagtgtgtggggcagcctttactcagaaaggtaacctcctccgccacattaaactg

SEQ ID NO: 546 - DNA, 66 bp, Synthetic construct
  source 1..66: mol_type = other DNA
ttcatctgtccagtgtgtggggcaaattttactcagaaaggtaacctcctccgccacattaaactg

SEQ ID NO: 547 - DNA, 66 bp, Synthetic construct
  source 1..66: mol_type = other DNA
ttcacctgtccaatctgtggggcaaagtttactcagaaaggtaacctcctccgccacattaaactg

SEQ ID NO: 548 - DNA, 66 bp, Synthetic construct
  source 1..66: mol_type = other DNA
ttctgctgtgagatctgtggggcatcatttactcagaaaggtaacctcctccgccacattaaactg

SEQ ID NO: 549 - DNA, 66 bp, Synthetic construct
  source 1..66: mol_type = other DNA
ttcgagtgtgaaatctgtggggcatgctttactcagaaaggtaacctcctccgccacattaaactg

SEQ ID NO: 550 - DNA, 66 bp, Synthetic construct
  source 1..66: mol_type = other DNA
ctgcactgccctatctgtggcttcacatgtactcagaaaggtaacctcctccgccacattaaactg

SEQ ID NO: 551 - DNA, 66 bp, Synthetic construct
  source 1..66: mol_type = other DNA
cttcgttgtgaaatctgtggcttcgcctgcactcagaaaggtaacctcctccgccacattaaactg

SEQ ID NO: 552 - DNA, 66 bp, Synthetic construct
  source 1..66: mol_type = other DNA
ttctgttgtgaggtctgtggggcaagttttactcagaaaggtaacctcctccgccacattaaactg

SEQ ID NO: 553 - DNA, 66 bp, Synthetic construct
  source 1..66: mol_type = other DNA
ttcacctgtcctatctgtggggcacactttactcagaaaggtaacctcctccgccacattaaactg

SEQ ID NO: 554 - DNA, 66 bp, Synthetic construct
  source 1..66: mol_type = other DNA
ttcgtatgtgagatctgtggggcagtgtttactcagaaaggtaacctcctccgccacattaaactg

SEQ ID NO: 555 - DNA, 66 bp, Synthetic construct
  source 1..66: mol_type = other DNA
ctgtggtgcccgatctgtggatttagctgcactcagaaaggtaacctcctccgccacattaaactg

SEQ ID NO: 556 - DNA, 66 bp, Synthetic construct
  source 1..66: mol_type = other DNA
ttcttgtgtgagatctgtggggcaaggtttactcagaaaggtaacctcctccgccacattaaactg

SEQ ID NO: 557 - DNA, 66 bp, Synthetic construct
  source 1..66: mol_type = other DNA
ttccagtgccccatctgtggcagacagttcactcagaaaggtaacctcctccgccacattaaactg

SEQ ID NO: 558 - DNA, 66 bp, Synthetic construct
  source 1..66: mol_type = other DNA
ttctgctgtgagatctgtggggcaacctttactcagaaaggtaacctcctccgccacattaaactg

SEQ ID NO: 559 - DNA, 66 bp, Synthetic construct
  source 1..66: mol_type = other DNA
ttccaatgtcccatatgtggcaggtacttcactcagaaaggtaacctcctccgccacattaaactg

SEQ ID NO: 560 - DNA, 66 bp, Synthetic construct
  source 1..66: mol_type = other DNA
ttcgagtgtaatatttgtggggcaagatttactcagaaaggtaacctcctccgccacattaaactg

SEQ ID NO: 561 - DNA, 66 bp, Synthetic construct
  source 1..66: mol_type = other DNA
ttcatctgtgaagtatgtggggcagagtttactcagaaaggtaacctcctccgccacattaaactg

SEQ ID NO: 562 - DNA, 66 bp, Synthetic construct
  source 1..66: mol_type = other DNA
ctcagatgcgaaatctgtgggttcacatgtactcagaaaggtaacctcctccgccacattaaactg

SEQ ID NO: 563 - DNA, 66 bp, Synthetic construct
  source 1..66: mol_type = other DNA
ttcacttgtgaggtgtgtggggcaggttttactcagaaaggtaacctcctccgccacattaaactg

SEQ ID NO: 564 - DNA, 66 bp, Synthetic construct
  source 1..66: mol_type = other DNA
ttgagatgtccaatttgtgggttccactgtactcagaaaggtaacctcctccgccacattaaactg

SEQ ID NO: 565 - DNA, 66 bp, Synthetic construct
  source 1..66: mol_type = other DNA
ttcgtgtgtcccgtatgtggggcatattttactcagaaaggtaacctcctccgccacattaaactg

SEQ ID NO: 566 - DNA, 66 bp, Synthetic construct
  source 1..66: mol_type = other DNA
ttcatgtgtccaatttgtggggcagcctttactcagaaaggtaacctcctccgccacattaaactg

SEQ ID NO: 567 - DNA, 66 bp, Synthetic construct
  source 1..66: mol_type = other DNA
ttcgaatgtgaagtgtgtggggcatcttttactcagaaaggtaacctcctccgccacattaaactg

SEQ ID NO: 568 - DNA, 66 bp, Synthetic construct
  source 1..66: mol_type = other DNA
ttccagtgtaatatttgtggggcacattttactcagaaaggtaacctcctccgccacattaaactg

SEQ ID NO: 569 - DNA, 66 bp, Synthetic construct
  source 1..66: mol_type = other DNA
cttttctgtgaaatttgcggtttcaggtgtactcagaaaggtaacctcctccgccacattaaactg

SEQ ID NO: 570 - DNA, 66 bp, Synthetic construct
  source 1..66: mol_type = other DNA
ctgcactgcccaatctgtggattcgcgtgcactcagaaaggtaacctcctccgccacattaaactg

SEQ ID NO: 571 - DNA, 66 bp, Synthetic construct
  source 1..66: mol_type = other DNA
ttcgagtgtgaagtgtgtggggcaaactttactcagaaaggtaacctcctccgccacattaaactg

SEQ ID NO: 572 - DNA, 66 bp, Synthetic construct
  source 1..66: mol_type = other DNA
ctcatctgtccaatctgcggcttcaagtgtactcagaaaggtaacctcctccgccacattaaactg

SEQ ID NO: 573 - DNA, 66 bp, Synthetic construct
  source 1..66: mol_type = other DNA
ttcgtgtgtaacatctgtggggcagcgtttactcagaaaggtaacctcctccgccacattaaactg

SEQ ID NO: 574 - DNA, 66 bp, Synthetic construct
  source 1..66: mol_type = other DNA
ttcaggtgtccagtatgtggggcagcttttactcagaaaggtaacctcctccgccacattaaactg

SEQ ID NO: 575 - DNA, 66 bp, Synthetic construct
  source 1..66: mol_type = other DNA
ttcgagtgtgaggtctgtggggcagtgtttactcagaaaggtaacctcctccgccacattaaactg

SEQ ID NO: 576 - DNA, 66 bp, Synthetic construct
  source 1..66: mol_type = other DNA
ttccagtgtgaacagtgtggggcaatgtttactcagaaaggtaacctcctccgccacattaaactg

SEQ ID NO: 577 - DNA, 66 bp, Synthetic construct
  source 1..66: mol_type = other DNA
ctcacctgtcctatttgtgggttcatgtgcactcagaaaggtaacctcctccgccacattaaactg

SEQ ID NO: 578 - DNA, 66 bp, Synthetic construct
  source 1..66: mol_type = other DNA
ctatgctgcccaatatgcgggtttatgtgcactcagaaaggtaacctcctccgccacattaaactg

SEQ ID NO: 579 - DNA, 66 bp, Synthetic construct
  source 1..66: mol_type = other DNA
ctgacatgtccaatatgcggtttctggtgcactcagaaaggtaacctcctccgccacattaaactg

SEQ ID NO: 580 - DNA, 66 bp, Synthetic construct
  source 1..66: mol_type = other DNA
ttccagtgtgaacagtgtggggcacaatttactcagaaaggtaacctcctccgccacattaaactg

SEQ ID NO: 581 - DNA, 66 bp, Synthetic construct
  source 1..66: mol_type = other DNA
ttctgctgtcccgtttgtggggcacaatttactcagaaaggtaacctcctccgccacattaaactg

SEQ ID NO: 582 - DNA, 66 bp, Synthetic construct
  source 1..66: mol_type = other DNA
ttccaatgtcccatttgcggtaggtgcttcactcagaaaggtaacctcctccgccacattaaactg

SEQ ID NO: 583 - DNA, 66 bp, Synthetic construct
  source 1..66: mol_type = other DNA
ttcgaatgtgaggtctgtggggcacagtttactcagaaaggtaacctcctccgccacattaaactg

SEQ ID NO: 584 - DNA, 66 bp, Synthetic construct
  source 1..66: mol_type = other DNA
tttcagtgcccaatttgtgggaggctcttcactcagaaaggtaacctcctccgccacattaaactg

SEQ ID NO: 585 - DNA, 66 bp, Synthetic construct
  source 1..66: mol_type = other DNA
ttcacctgtccagtttgtggggcatggtttactcagaaaggtaacctcctccgccacattaaactg

SEQ ID NO: 586 - DNA, 66 bp, Synthetic construct
  source 1..66: mol_type = other DNA
cttatgtgtccaatttgtggtttcggatgcactcagaaaggtaacctcctccgccacattaaactg

SEQ ID NO: 587 - DNA, 66 bp, Synthetic construct
  source 1..66: mol_type = other DNA
ctatcttgccctatatgcggctttcactgcactcagaaaggtaacctcctccgccacattaaactg

SEQ ID NO: 588 - DNA, 66 bp, Synthetic construct
  source 1..66: mol_type = other DNA
ttcgaatgcccaatatgcggcagaaaattcactcagaaaggtaacctcctccgccacattaaactg

SEQ ID NO: 589 - DNA, 66 bp, Synthetic construct
  source 1..66: mol_type = other DNA
ttccactgtccaatttgtggggcaccttttactcagaaaggtaacctcctccgccacattaaactg

SEQ ID NO: 590 - DNA, 66 bp, Synthetic construct
  source 1..66: mol_type = other DNA
ttcgtctgtgaggtctgtggggcatactttactcagaaaggtaacctcctccgccacattaaactg

SEQ ID NO: 591 - DNA, 66 bp, Synthetic construct
  source 1..66: mol_type = other DNA
ttcatgtgtgaggtatgtggggcagcttttactcagaaaggtaacctcctccgccacattaaactg

SEQ ID NO: 592 - DNA, 66 bp, Synthetic construct
  source 1..66: mol_type = other DNA
ttcacttgtccaatctgcggtcatcaattcactcagaaaggtaacctcctccgccacattaaactg

SEQ ID NO: 593 - DNA, 66 bp, Synthetic construct
  source 1..66: mol_type = other DNA
ctggactgccccatctgcggcttctactgcactcagaaaggtaacctcctccgccacattaaactg

SEQ ID NO: 594 - DNA, 66 bp, Synthetic construct
  source 1..66: mol_type = other DNA
ttcacatgtccaatttgtggggcatggtttactcagaaaggtaacctcctccgccacattaaactg

SEQ ID NO: 595 - DNA, 66 bp, Synthetic construct
  source 1..66: mol_type = other DNA
ttggagtgccctatctgcggtttcggatgcactcagaaaggtaacctcctccgccacattaaactg

SEQ ID NO: 596 - DNA, 66 bp, Synthetic construct
  source 1..66: mol_type = other DNA
cttctgtgcccgatttgcggcttccaatgtactcagaaaggtaacctcctccgccacattaaactg

SEQ ID NO: 597 - DNA, 66 bp, Synthetic construct
  source 1..66: mol_type = other DNA
ttctgttgtgagatatgtggggcacaatttactcagaaaggtaacctcctccgccacattaaactg

SEQ ID NO: 598 - DNA, 66 bp, Synthetic construct
  source 1..66: mol_type = other DNA
ttcacgtgtgagatatgtggggcaggatttactcagaaaggtaacctcctccgccacattaaactg

SEQ ID NO: 599 - DNA, 66 bp, Synthetic construct
  source 1..66: mol_type = other DNA
ctaagctgcccaatatgcgggttccggtgtactcagaaaggtaacctcctccgccacattaaactg

SEQ ID NO: 600 - DNA, 66 bp, Synthetic construct
  source 1..66: mol_type = other DNA
ttcgattgtgagatttgtggggcacggtttactcagaaaggtaacctcctccgccacattaaactg

SEQ ID NO: 601 - DNA, 66 bp, Synthetic construct
  source 1..66: mol_type = other DNA
ttcgtctgtgaggtttgtggggcagagtttactcagaaaggtaacctcctccgccacattaaactg

SEQ ID NO: 602 - DNA, 66 bp, Synthetic construct
  source 1..66: mol_type = other DNA
ttcgagtgtccaatttgtggggcaatgtttactcagaaaggtaacctcctccgccacattaaactg

SEQ ID NO: 603 - DNA, 66 bp, Synthetic construct
  source 1..66: mol_type = other DNA
ctgttctgccccatatgtgggttctgttgtactcagaaaggtaacctcctccgccacattaaactg

SEQ ID NO: 604 - DNA, 66 bp, Synthetic construct
  source 1..66: mol_type = other DNA
ttctgctgtcccgtttgtggggcaagatttactcagaaaggtaacctcctccgccacattaaactg

SEQ ID NO: 605 - DNA, 66 bp, Synthetic construct
  source 1..66: mol_type = other DNA
ttccagtgtgagatatgtggggcatggtttactcagaaaggtaacctcctccgccacattaaactg

SEQ ID NO: 606 - DNA, 66 bp, Synthetic construct
  source 1..66: mol_type = other DNA
ttctgctgtgaagtatgtggggcatgttttactcagaaaggtaacctcctccgccacattaaactg

SEQ ID NO: 607 - DNA, 66 bp, Synthetic construct
  source 1..66: mol_type = other DNA
ctgtgctgcccgatctgtgggtttcattgcactcagaaaggtaacctcctccgccacattaaactg

SEQ ID NO: 608 - DNA, 66 bp, Synthetic construct
  source 1..66: mol_type = other DNA
ttccagtgtgaagtatgtggggcattttttactcagaaaggtaacctcctccgccacattaaactg

SEQ ID NO: 609 - DNA, 66 bp, Synthetic construct
  source 1..66: mol_type = other DNA
ctggaatgccctatatgtggatttatctgcactcagaaaggtaacctcctccgccacattaaactg

SEQ ID NO: 610 - DNA, 66 bp, Synthetic construct
  source 1..66: mol_type = other DNA
ttgtgctgcccaatctgcggcttctggtgtactcagaaaggtaacctcctccgccacattaaactg

SEQ ID NO: 611 - DNA, 66 bp, Synthetic construct
  source 1..66: mol_type = other DNA
ttcaattgtccagtgtgtggggcaccctttactcagaaaggtaacctcctccgccacattaaactg

SEQ ID NO: 612 - DNA, 66 bp, Synthetic construct
  source 1..66: mol_type = other DNA
ctctattgcgaaatatgcggtttcacatgcactcagaaaggtaacctcctccgccacattaaactg

SEQ ID NO: 613 - DNA, 66 bp, Synthetic construct
  source 1..66: mol_type = other DNA
ttggcgtgtcccatctgtggctttttttgcactcagaaaggtaacctcctccgccacattaaactg

SEQ ID NO: 614 - DNA, 66 bp, Synthetic construct
  source 1..66: mol_type = other DNA
ttcgtctgtgaagtctgtggggcaacctttactcagaaaggtaacctcctccgccacattaaactg

SEQ ID NO: 615 - DNA, 66 bp, Synthetic construct
  source 1..66: mol_type = other DNA
ttcgaatgtcctgtgtgtggggcagactttactcagaaaggtaacctcctccgccacattaaactg

SEQ ID NO: 616 - DNA, 66 bp, Synthetic construct
  source 1..66: mol_type = other DNA
ctcacgtgcccaatttgtggcttcgtttgtactcagaaaggtaacctcctccgccacattaaactg

SEQ ID NO: 617 - DNA, 66 bp, Synthetic construct
  source 1..66: mol_type = other DNA
ttctgctgtgaaatctgtggggcatgttttactcagaaaggtaacctcctccgccacattaaactg

SEQ ID NO: 618 - DNA, 66 bp, Synthetic construct
  source 1..66: mol_type = other DNA
ttcgactgtcccgtgtgtggggcacagtttactcagaaaggtaacctcctccgccacattaaactg

SEQ ID NO: 619 - DNA, 66 bp, Synthetic construct
  source 1..66: mol_type = other DNA
ttcgcttgtcctgtgtgtggggcaccctttactcagaaaggtaacctcctccgccacattaaactg

SEQ ID NO: 620 - DNA, 66 bp, Synthetic construct
  source 1..66: mol_type = other DNA
ctgcactgcccaatatgtggcttcttttgtactcagaaaggtaacctcctccgccacattaaactg

SEQ ID NO: 621 - DNA, 66 bp, Synthetic construct
  source 1..66: mol_type = other DNA
ttcatctgtgaaatctgtggggcaacttttactcagaaaggtaacctcctccgccacattaaactg

SEQ ID NO: 622 - DNA, 66 bp, Synthetic construct
  source 1..66: mol_type = other DNA
ttcgtgtgtccaatttgtggggcaacatttactcagaaaggtaacctcctccgccacattaaactg

SEQ ID NO: 623 - DNA, 66 bp, Synthetic construct
  source 1..66: mol_type = other DNA
ctaagatgtcccatctgtggatttacttgtactcagaaaggtaacctcctccgccacattaaactg

SEQ ID NO: 624 - DNA, 66 bp, Synthetic construct
  source 1..66: mol_type = other DNA
ttctgttgtcccatctgtggggcaaattttactcagaaaggtaacctcctccgccacattaaactg

SEQ ID NO: 625 - DNA, 66 bp, Synthetic construct
  source 1..66: mol_type = other DNA
ttcgagtgtaatatttgtggggcaaactttactcagaaaggtaacctcctccgccacattaaactg

SEQ ID NO: 626 - DNA, 66 bp, Synthetic construct
  source 1..66: mol_type = other DNA
tttcaatgtccaatctgcgggcgcttcttcactcagaaaggtaacctcctccgccacattaaactg

SEQ ID NO: 627 - DNA, 66 bp, Synthetic construct
  source 1..66: mol_type = other DNA
ttctgctgtcctatctgtggggcagcctttactcagaaaggtaacctcctccgccacattaaactg

SEQ ID NO: 628 - DNA, 66 bp, Synthetic construct
  source 1..66: mol_type = other DNA
tttcagtgcccgatttgtgggcgggaatttactcagaaaggtaacctcctccgccacattaaactg

SEQ ID NO: 629 - DNA, 66 bp, Synthetic construct
  source 1..66: mol_type = other DNA
ctgtgttgcccgatatgcggttttgaatgcactcagaaaggtaacctcctccgccacattaaactg

SEQ ID NO: 630 - DNA, 66 bp, Synthetic construct
  source 1..66: mol_type = other DNA
ttcgactgtcctatttgtggggcagcctttactcagaaaggtaacctcctccgccacattaaactg

SEQ ID NO: 631 - DNA, 66 bp, Synthetic construct
  source 1..66: mol_type = other DNA
ttctattgtccaatatgtggggcaccgtttactcagaaaggtaacctcctccgccacattaaactg

SEQ ID NO: 632 - DNA, 66 bp, Synthetic construct
  source 1..66: mol_type = other DNA
ttcttttgtgaggtatgtggggcaaggtttactcagaaaggtaacctcctccgccacattaaactg

SEQ ID NO: 633 - DNA, 66 bp, Synthetic construct
  source 1..66: mol_type = other DNA
ttccgctgtccaatctgtggggcagcctttactcagaaaggtaacctcctccgccacattaaactg

SEQ ID NO: 634 - DNA, 66 bp, Synthetic construct
  source 1..66: mol_type = other DNA
ctgctgtgccctatctgcggctttggctgcactcagaaaggtaacctcctccgccacattaaactg

SEQ ID NO: 635 - DNA, 66 bp, Synthetic construct
  source 1..66: mol_type = other DNA
cttatgtgccccatttgcggattttactgcactcagaaaggtaacctcctccgccacattaaactg

SEQ ID NO: 636 - DNA, 66 bp, Synthetic construct
  source 1..66: mol_type = other DNA
ttgatctgtgagatctgcgggttcatgtgtactcagaaaggtaacctcctccgccacattaaactg

SEQ ID NO: 637 - DNA, 66 bp, Synthetic construct
  source 1..66: mol_type = other DNA
ttcgagtgtgaagtgtgtggggcatgttttactcagaaaggtaacctcctccgccacattaaactg

SEQ ID NO: 638 - DNA, 66 bp, Synthetic construct
  source 1..66: mol_type = other DNA
ttcacatgtccaatctgtggggcaatgtttactcagaaaggtaacctcctccgccacattaaactg

SEQ ID NO: 639 - DNA, 66 bp, Synthetic construct
  source 1..66: mol_type = other DNA
ttcatctgtcccatctgtggggcatgttttactcagaaaggtaacctcctccgccacattaaactg

SEQ ID NO: 640 - DNA, 66 bp, Synthetic construct
  source 1..66: mol_type = other DNA
ttcgtgtgtcctatctgtggggcagtctttactcagaaaggtaacctcctccgccacattaaactg

SEQ ID NO: 641 - DNA, 66 bp, Synthetic construct
  source 1..66: mol_type = other DNA
ttcgattgtccaatatgtggggcaaaatttactcagaaaggtaacctcctccgccacattaaactg

SEQ ID NO: 642 - DNA, 66 bp, Synthetic construct
  source 1..66: mol_type = other DNA
ctctggtgtcccatttgtggcttttgctgcactcagaaaggtaacctcctccgccacattaaactg

SEQ ID NO: 643 - DNA, 66 bp, Synthetic construct
  source 1..66: mol_type = other DNA
ttcgagtgtgaaatctgtggggcaacctttactcagaaaggtaacctcctccgccacattaaactg

SEQ ID NO: 644 - DNA, 66 bp, Synthetic construct
  source 1..66: mol_type = other DNA
ttcgaatgtgaagtctgtggggcaacttttactcagaaaggtaacctcctccgccacattaaactg

SEQ ID NO: 645 - DNA, 66 bp, Synthetic construct
  source 1..66: mol_type = other DNA
ctggattgccccatctgtggcttttcctgtactcagaaaggtaacctcctccgccacattaaactg

SEQ ID NO: 646 - DNA, 66 bp, Synthetic construct
  source 1..66: mol_type = other DNA
ttctgttgtcctgtgtgtggggcagcctttactcagaaaggtaacctcctccgccacattaaactg

SEQ ID NO: 647 - DNA, 66 bp, Synthetic construct
  source 1..66: mol_type = other DNA
ttcatctgtccagtatgtggggcatgctttactcagaaaggtaacctcctccgccacattaaactg

SEQ ID NO: 648 - DNA, 66 bp, Synthetic construct
  source 1..66: mol_type = other DNA
ttctgttgtgagatttgtggggcagtgtttactcagaaaggtaacctcctccgccacattaaactg

SEQ ID NO: 649 - DNA, 66 bp, Synthetic construct
  source 1..66: mol_type = other DNA
ttcgtgtgtgaaatttgtggggcaatgtttactcagaaaggtaacctcctccgccacattaaactg

SEQ ID NO: 650 - DNA, 66 bp, Synthetic construct
  source 1..66: mol_type = other DNA
ttcgagtgtaacatctgtggggcagtatttactcagaaaggtaacctcctccgccacattaaactg

SEQ ID NO: 651 - DNA, 66 bp, Synthetic construct
  source 1..66: mol_type = other DNA
ttgatctgtgaaatttgcggcttttgctgcactcagaaaggtaacctcctccgccacattaaactg

SEQ ID NO: 652 - DNA, 66 bp, Synthetic construct
  source 1..66: mol_type = other DNA
ttcacctgtgaaatctgtggggcaatttttactcagaaaggtaacctcctccgccacattaaactg

SEQ ID NO: 653 - DNA, 66 bp, Synthetic construct
  source 1..66: mol_type = other DNA
ttcatatgtccagtctgtggggcacggtttactcagaaaggtaacctcctccgccacattaaactg

SEQ ID NO: 654 - DNA, 66 bp, Synthetic construct
  source 1..66: mol_type = other DNA
ttccagtgtccaatctgtgggaggcactttactcagaaaggtaacctcctccgccacattaaactg

SEQ ID NO: 655 - DNA, 66 bp, Synthetic construct
  source 1..66: mol_type = other DNA
ttcagctgtgagatatgtggggcagcgtttactcagaaaggtaacctcctccgccacattaaactg

SEQ ID NO: 656 - DNA, 66 bp, Synthetic construct
  source 1..66: mol_type = other DNA
ttcgactgtcccatctgtggggcaccgtttactcagaaaggtaacctcctccgccacattaaactg

SEQ ID NO: 657 - DNA, 66 bp, Synthetic construct
  source 1..66: mol_type = other DNA
tttcagtgcccaatctgcggcagggcatttactcagaaaggtaacctcctccgccacattaaactg

SEQ ID NO: 658 - DNA, 66 bp, Synthetic construct
  source 1..66: mol_type = other DNA
ttcgattgtccaatctgtggggcaaactttactcagaaaggtaacctcctccgccacattaaactg

SEQ ID NO: 659 - DNA, 66 bp, Synthetic construct
  source 1..66: mol_type = other DNA
ttgtgctgtcctatatgcggatttatttgtactcagaaaggtaacctcctccgccacattaaactg

SEQ ID NO: 660 - DNA, 66 bp, Synthetic construct
  source 1..66: mol_type = other DNA
ctgatctgtgaaatttgtggcttcggctgtactcagaaaggtaacctcctccgccacattaaactg

SEQ ID NO: 661 - DNA, 66 bp, Synthetic construct
  source 1..66: mol_type = other DNA
ttcatttgtgaggtttgtggggcacattttactcagaaaggtaacctcctccgccacattaaactg

SEQ ID NO: 662 - DNA, 66 bp, Synthetic construct
  source 1..66: mol_type = other DNA
ttcatttgtccggtctgtggggcaggctttactcagaaaggtaacctcctccgccacattaaactg

SEQ ID NO: 663 - DNA, 66 bp, Synthetic construct
  source 1..66: mol_type = other DNA
ttcatctgtgaggtgtgtggggcatattttactcagaaaggtaacctcctccgccacattaaactg

SEQ ID NO: 664 - DNA, 66 bp, Synthetic construct
  source 1..66: mol_type = other DNA
ctcctgtgcccaatttgcggatttccatgcactcagaaaggtaacctcctccgccacattaaactg

SEQ ID NO: 665 - DNA, 66 bp, Synthetic construct
  source 1..66: mol_type = other DNA
ttcatctgtcctgtgtgtggggcagagtttactcagaaaggtaacctcctccgccacattaaactg

SEQ ID NO: 666 - DNA, 66 bp, Synthetic construct
  source 1..66: mol_type = other DNA
ttcacatgtaatatatgtggggcatactttactcagaaaggtaacctcctccgccacattaaactg

SEQ ID NO: 667 - DNA, 66 bp, Synthetic construct
  source 1..66: mol_type = other DNA
ttcatttgtgagatctgtggggcaatgtttactcagaaaggtaacctcctccgccacattaaactg

SEQ ID NO: 668 - DNA, 66 bp, Synthetic construct
  source 1..66: mol_type = other DNA
ttcacttgtaacatctgtggggcatcttttactcagaaaggtaacctcctccgccacattaaactg

SEQ ID NO: 669 - DNA, 66 bp, Synthetic construct
  source 1..66: mol_type = other DNA
ttcgattgtccaatttgtggggcatgttttactcagaaaggtaacctcctccgccacattaaactg

SEQ ID NO: 670 - DNA, 66 bp, Synthetic construct
  source 1..66: mol_type = other DNA
ttcatctgtgagatttgtggggcagtgtttactcagaaaggtaacctcctccgccacattaaactg

SEQ ID NO: 671 - DNA, 66 bp, Synthetic construct
  source 1..66: mol_type = other DNA
ttccagtgtgagatctgtggaagaatatttactcagaaaggtaacctcctccgccacattaaactg

SEQ ID NO: 672 - DNA, 66 bp, Synthetic construct
  source 1..66: mol_type = other DNA
ttcatttgtgagatctgtggggcatactttactcagaaaggtaacctcctccgccacattaaactg

SEQ ID NO: 673 - DNA, 66 bp, Synthetic construct
  source 1..66: mol_type = other DNA
ttccagtgtccccagtgtggggcaaattttactcagaaaggtaacctcctccgccacattaaactg

SEQ ID NO: 674 - DNA, 66 bp, Synthetic construct
  source 1..66: mol_type = other DNA
ttcacctgtcccgtatgtggggcaatttttactcagaaaggtaacctcctccgccacattaaactg

SEQ ID NO: 675 - DNA, 66 bp, Synthetic construct
  source 1..66: mol_type = other DNA
ttctactgtgagatctgtggggcacaatttactcagaaaggtaacctcctccgccacattaaactg

SEQ ID NO: 676 - DNA, 66 bp, Synthetic construct
  source 1..66: mol_type = other DNA
ctagcctgtccaatatgcggcttccgctgtactcagaaaggtaacctcctccgccacattaaactg

SEQ ID NO: 677 - DNA, 66 bp, Synthetic construct
  source 1..66: mol_type = other DNA
ttcagctgtcctgtatgtggggcaccgtttactcagaaaggtaacctcctccgccacattaaactg

SEQ ID NO: 678 - DNA, 66 bp, Synthetic construct
  source 1..66: mol_type = other DNA
ttcaggtgtgaaatctgtggggcaagctttactcagaaaggtaacctcctccgccacattaaactg

SEQ ID NO: 679 - DNA, 66 bp, Synthetic construct
  source 1..66: mol_type = other DNA
ttctcgtgtgaaatttgtggggcacgttttactcagaaaggtaacctcctccgccacattaaactg

SEQ ID NO: 680 - DNA, 66 bp, Synthetic construct
  source 1..66: mol_type = other DNA
ttctgctgtcccgtctgtggggcaacttttactcagaaaggtaacctcctccgccacattaaactg

SEQ ID NO: 681 - DNA, 66 bp, Synthetic construct
  source 1..66: mol_type = other DNA
ttcatgtgtcccgtgtgtggggcagcttttactcagaaaggtaacctcctccgccacattaaactg

SEQ ID NO: 682 - DNA, 66 bp, Synthetic construct
  source 1..66: mol_type = other DNA
ttcacatgtgagatctgtggggcacactttactcagaaaggtaacctcctccgccacattaaactg

SEQ ID NO: 683 - DNA, 66 bp, Synthetic construct
  source 1..66: mol_type = other DNA
ttcagctgtccaatatgtggggcagcttttactcagaaaggtaacctcctccgccacattaaactg

SEQ ID NO: 684 - DNA, 66 bp, Synthetic construct
  source 1..66: mol_type = other DNA
ttctgttgtccaatttgtggggcatgctttactcagaaaggtaacctcctccgccacattaaactg

SEQ ID NO: 685 - DNA, 66 bp, Synthetic construct
  source 1..66: mol_type = other DNA
ttcatctgtgaaatctgtggggcacattttactcagaaaggtaacctcctccgccacattaaactg

SEQ ID NO: 686 - DNA, 66 bp, Synthetic construct
  source 1..66: mol_type = other DNA
ttcgagtgtaatatatgtggggcagcctttactcagaaaggtaacctcctccgccacattaaactg

SEQ ID NO: 687 - DNA, 66 bp, Synthetic construct
  source 1..66: mol_type = other DNA
ctttgctgcccgatctgcggtttcgtttgcactcagaaaggtaacctcctccgccacattaaactg

SEQ ID NO: 688 - DNA, 66 bp, Synthetic construct
  source 1..66: mol_type = other DNA
ctcgggtgcccaatctgcggcttctactgcactcagaaaggtaacctcctccgccacattaaactg

SEQ ID NO: 689 - DNA, 66 bp, Synthetic construct
  source 1..66: mol_type = other DNA
ttctgctgtcctgtttgtggggcaccgtttactcagaaaggtaacctcctccgccacattaaactg

SEQ ID NO: 690 - DNA, 66 bp, Synthetic construct
  source 1..66: mol_type = other DNA
ttcgtgtgtcctgtctgtggggcaaagtttactcagaaaggtaacctcctccgccacattaaactg

SEQ ID NO: 691 - DNA, 66 bp, Synthetic construct
  source 1..66: mol_type = other DNA
ttctgttgtccaatttgtggggcaaaatttactcagaaaggtaacctcctccgccacattaaactg

SEQ ID NO: 692 - DNA, 66 bp, Synthetic construct
  source 1..66: mol_type = other DNA
ctgtggtgtcccatctgcggcttcacttgtactcagaaaggtaacctcctccgccacattaaactg

SEQ ID NO: 693 - DNA, 66 bp, Synthetic construct
  source 1..66: mol_type = other DNA
ttctggtgtccagtgtgtggggcacagtttactcagaaaggtaacctcctccgccacattaaactg

SEQ ID NO: 694 - DNA, 66 bp, Synthetic construct
  source 1..66: mol_type = other DNA
ttcttgtgtgaagtctgtggggcacggtttactcagaaaggtaacctcctccgccacattaaactg

SEQ ID NO: 695 - DNA, 66 bp, Synthetic construct
  source 1..66: mol_type = other DNA
ttattctgtgagatctgcggttttcagtgtactcagaaaggtaacctcctccgccacattaaactg

SEQ ID NO: 696 - DNA, 66 bp, Synthetic construct
  source 1..66: mol_type = other DNA
ttctgctgtcctatctgtggggcaacctttactcagaaaggtaacctcctccgccacattaaactg

SEQ ID NO: 697 - DNA, 66 bp, Synthetic construct
  source 1..66: mol_type = other DNA
ttcttctgtccaatttgtggggcaccatttactcagaaaggtaacctcctccgccacattaaactg

SEQ ID NO: 698 - DNA, 66 bp, Synthetic construct
  source 1..66: mol_type = other DNA
ttcgtgtgtgatgtatgtggggcaccctttactcagaaaggtaacctcctccgccacattaaactg

SEQ ID NO: 699 - DNA, 66 bp, Synthetic construct
  source 1..66: mol_type = other DNA
ctcatctgccctatatgtgggtttcactgtactcagaaaggtaacctcctccgccacattaaactg

SEQ ID NO: 700 - DNA, 66 bp, Synthetic construct
  source 1..66: mol_type = other DNA
tttgtctgcccaatctgcgggaggcggttcactcagaaaggtaacctcctccgccacattaaactg

SEQ ID NO: 701 - DNA, 66 bp, Synthetic construct
  source 1..66: mol_type = other DNA
ttacagtgtgaaatttgcggttttcattgtactcagaaaggtaacctcctccgccacattaaactg

SEQ ID NO: 702 - DNA, 66 bp, Synthetic construct
  source 1..66: mol_type = other DNA
ttctcttgtgaggtgtgtggggcaaggtttactcagaaaggtaacctcctccgccacattaaactg

SEQ ID NO: 703 - DNA, 66 bp, Synthetic construct
  source 1..66: mol_type = other DNA
ctcatgtgccccatttgcggcttctgttgtactcagaaaggtaacctcctccgccacattaaactg

SEQ ID NO: 704 - DNA, 66 bp, Synthetic construct
  source 1..66: mol_type = other DNA
ttcgactgtgaggtatgtggggcaaggtttactcagaaaggtaacctcctccgccacattaaactg

SEQ ID NO: 705 - DNA, 66 bp, Synthetic construct
  source 1..66: mol_type = other DNA
ctctcgtgccctatatgtggattttggtgcactcagaaaggtaacctcctccgccacattaaactg

SEQ ID NO: 706 - DNA, 66 bp, Synthetic construct
  source 1..66: mol_type = other DNA
tttacttgccccatttgtggtcgcagattcactcagaaaggtaacctcctccgccacattaaactg

SEQ ID NO: 707 - DNA, 66 bp, Synthetic construct
  source 1..66: mol_type = other DNA
ttcgaatgtgaaatctgtggggcaccctttactcagaaaggtaacctcctccgccacattaaactg

SEQ ID NO: 708 - DNA, 66 bp, Synthetic construct
  source 1..66: mol_type = other DNA
ctccggtgcgagatttgtggatttccctgcactcagaaaggtaacctcctccgccacattaaactg

SEQ ID NO: 709 - DNA, 66 bp, Synthetic construct
  source 1..66: mol_type = other DNA
ttcgtgtgtaacgtgtgtggggcaccatttactcagaaaggtaacctcctccgccacattaaactg

SEQ ID NO: 710 - DNA, 66 bp, Synthetic construct
  source 1..66: mol_type = other DNA
ttcctttgtgaaatatgtggggcaaagtttactcagaaaggtaacctcctccgccacattaaactg

SEQ ID NO: 711 - DNA, 66 bp, Synthetic construct
  source 1..66: mol_type = other DNA
ttccgatgtgaggtgtgtggggcaagctttactcagaaaggtaacctcctccgccacattaaactg

SEQ ID NO: 712 - DNA, 66 bp, Synthetic construct
  source 1..66: mol_type = other DNA
ttcctttgtgaaatctgtggggcacagtttactcagaaaggtaacctcctccgccacattaaactg

SEQ ID NO: 713 - DNA, 66 bp, Synthetic construct
  source 1..66: mol_type = other DNA
ttcatctgtaacgtctgtggggcaccttttactcagaaaggtaacctcctccgccacattaaactg

SEQ ID NO: 714 - DNA, 66 bp, Synthetic construct
  source 1..66: mol_type = other DNA
ttccaatgtcctcaatgtggggcagagtttactcagaaaggtaacctcctccgccacattaaactg

SEQ ID NO: 715 - DNA, 66 bp, Synthetic construct
  source 1..66: mol_type = other DNA
ttcgtgtgtccagtgtgtggggcacactttactcagaaaggtaacctcctccgccacattaaactg

SEQ ID NO: 716 - DNA, 66 bp, Synthetic construct
  source 1..66: mol_type = other DNA
ttccggtgtgagatctgcggaaggccttttactcagaaaggtaacctcctccgccacattaaactg

SEQ ID NO: 717 - DNA, 66 bp, Synthetic construct
  source 1..66: mol_type = other DNA
ttctgctgtcctatatgtggggcagtgtttactcagaaaggtaacctcctccgccacattaaactg

SEQ ID NO: 718 - DNA, 66 bp, Synthetic construct
  source 1..66: mol_type = other DNA
ttccagtgtgaagtgtgtggggcatggtttactcagaaaggtaacctcctccgccacattaaactg

SEQ ID NO: 719 - DNA, 66 bp, Synthetic construct
  source 1..66: mol_type = other DNA
ctgatgtgtcccatctgcggatttcactgcactcagaaaggtaacctcctccgccacattaaactg

SEQ ID NO: 720 - DNA, 66 bp, Synthetic construct
  source 1..66: mol_type = other DNA
ttcgagtgtaacatctgtggggcacaatttactcagaaaggtaacctcctccgccacattaaactg

SEQ ID NO: 721 - DNA, 66 bp, Synthetic construct
  source 1..66: mol_type = other DNA
ttctgctgtcccgtgtgtggggcatgttttactcagaaaggtaacctcctccgccacattaaactg

SEQ ID NO: 722 - DNA, 66 bp, Synthetic construct
  source 1..66: mol_type = other DNA
ttcatatgtcctatttgtggggcaaaatttactcagaaaggtaacctcctccgccacattaaactg

SEQ ID NO: 723 - DNA, 66 bp, Synthetic construct
  source 1..66: mol_type = other DNA
ttctgctgtgagatttgtggggcaccttttactcagaaaggtaacctcctccgccacattaaactg

SEQ ID NO: 724 - DNA, 66 bp, Synthetic construct
  source 1..66: mol_type = other DNA
ttcatgtgtgaagtgtgtggggcatcgtttactcagaaaggtaacctcctccgccacattaaactg

SEQ ID NO: 725 - DNA, 66 bp, Synthetic construct
  source 1..66: mol_type = other DNA
ctttggtgcccaatatgtggcttccggtgcactcagaaaggtaacctcctccgccacattaaactg

SEQ ID NO: 726 - DNA, 66 bp, Synthetic construct
  source 1..66: mol_type = other DNA
ttcacttgtcctgtgtgtggggcattctttactcagaaaggtaacctcctccgccacattaaactg

SEQ ID NO: 727 - DNA, 66 bp, Synthetic construct
  source 1..66: mol_type = other DNA
ctgatttgtcccatttgcggcttcttttgcactcagaaaggtaacctcctccgccacattaaactg

SEQ ID NO: 728 - DNA, 66 bp, Synthetic construct
  source 1..66: mol_type = other DNA
ttcatatgtgaagtctgtggggcaacctttactcagaaaggtaacctcctccgccacattaaactg

SEQ ID NO: 729 - DNA, 66 bp, Synthetic construct
  source 1..66: mol_type = other DNA
ctgacgtgcgagatatgcggtttctgctgcactcagaaaggtaacctcctccgccacattaaactg

SEQ ID NO: 730 - DNA, 66 bp, Synthetic construct
  source 1..66: mol_type = other DNA
ttcatatgtaacatatgtggggcacagtttactcagaaaggtaacctcctccgccacattaaactg

SEQ ID NO: 731 - DNA, 66 bp, Synthetic construct
  source 1..66: mol_type = other DNA
ttcgtttgtgaggtctgtggggcaatgtttactcagaaaggtaacctcctccgccacattaaactg

SEQ ID NO: 732 - DNA, 66 bp, Synthetic construct
  source 1..66: mol_type = other DNA
ctatggtgtccaatctgcggctttttttgcactcagaaaggtaacctcctccgccacattaaactg

SEQ ID NO: 733 - DNA, 66 bp, Synthetic construct
  source 1..66: mol_type = other DNA
ctgaattgcccaatttgtggcttctattgcactcagaaaggtaacctcctccgccacattaaactg

SEQ ID NO: 734 - DNA, 66 bp, Synthetic construct
  source 1..66: mol_type = other DNA
ttattctgccctatctgtggctttcagtgcactcagaaaggtaacctcctccgccacattaaactg

SEQ ID NO: 735 - DNA, 66 bp, Synthetic construct
  source 1..66: mol_type = other DNA
ttctggtgtgaaatttgtggggcacagtttactcagaaaggtaacctcctccgccacattaaactg

SEQ ID NO: 736 - DNA, 66 bp, Synthetic construct
  source 1..66: mol_type = other DNA
cttatgtgcgagatttgtgggttccagtgcactcagaaaggtaacctcctccgccacattaaactg

SEQ ID NO: 737 - DNA, 66 bp, Synthetic construct
  source 1..66: mol_type = other DNA
ttagaatgtcctatctgcggtttctggtgtactcagaaaggtaacctcctccgccacattaaactg

SEQ ID NO: 738 - DNA, 66 bp, Synthetic construct
  source 1..66: mol_type = other DNA
ttcacctgtgaggtttgtggggcacactttactcagaaaggtaacctcctccgccacattaaactg

SEQ ID NO: 739 - DNA, 66 bp, Synthetic construct
  source 1..66: mol_type = other DNA
tttgattgtccaatatgtggccgcatttttactcagaaaggtaacctcctccgccacattaaactg

SEQ ID NO: 740 - DNA, 66 bp, Synthetic construct
  source 1..66: mol_type = other DNA
ttctggtgtgaggtgtgtggggcacagtttactcagaaaggtaacctcctccgccacattaaactg

SEQ ID NO: 741 - DNA, 66 bp, Synthetic construct
  source 1..66: mol_type = other DNA
ttcacgtgtgaggtgtgtggggcaaactttactcagaaaggtaacctcctccgccacattaaactg

SEQ ID NO: 742 - DNA, 66 bp, Synthetic construct
  source 1..66: mol_type = other DNA
ttgtgctgtccaatctgcgggttcaactgcactcagaaaggtaacctcctccgccacattaaactg

SEQ ID NO: 743 - DNA, 66 bp, Synthetic construct
  source 1..66: mol_type = other DNA
ttggactgtccaatatgcggtttcaaatgtactcagaaaggtaacctcctccgccacattaaactg

SEQ ID NO: 744 - DNA, 66 bp, Synthetic construct
  source 1..66: mol_type = other DNA
ttcatgtgtccggtctgtggggcatcatttactcagaaaggtaacctcctccgccacattaaactg

SEQ ID NO: 745 - DNA, 66 bp, Synthetic construct
  source 1..66: mol_type = other DNA
ttcacctgtgagatatgtggggcagagtttactcagaaaggtaacctcctccgccacattaaactg

SEQ ID NO: 746 - DNA, 66 bp, Synthetic construct
  source 1..66: mol_type = other DNA
ctgagctgtcccatctgtggcttctgctgcactcagaaaggtaacctcctccgccacattaaactg

SEQ ID NO: 747 - DNA, 66 bp, Synthetic construct
  source 1..66: mol_type = other DNA
ttcgtgtgtcctgtgtgtggggcaacttttactcagaaaggtaacctcctccgccacattaaactg

SEQ ID NO: 748 - DNA, 66 bp, Synthetic construct
  source 1..66: mol_type = other DNA
ttcagttgtcctatctgtggggcaagctttactcagaaaggtaacctcctccgccacattaaactg

SEQ ID NO: 749 - DNA, 66 bp, Synthetic construct
  source 1..66: mol_type = other DNA
ttcgtttgtgaggtctgtggggcagtgtttactcagaaaggtaacctcctccgccacattaaactg

SEQ ID NO: 750 - DNA, 66 bp, Synthetic construct
  source 1..66: mol_type = other DNA
ttagaatgcgaaatatgtgggttccagtgtactcagaaaggtaacctcctccgccacattaaactg

SEQ ID NO: 751 - DNA, 66 bp, Synthetic construct
  source 1..66: mol_type = other DNA
ttcagctgtgaggtctgtggggcagcttttactcagaaaggtaacctcctccgccacattaaactg

SEQ ID NO: 752 - DNA, 66 bp, Synthetic construct
  source 1..66: mol_type = other DNA
ttagattgccccatttgtggctttttttgcactcagaaaggtaacctcctccgccacattaaactg

SEQ ID NO: 753 - DNA, 66 bp, Synthetic construct
  source 1..66: mol_type = other DNA
ttcgactgtccggtctgtggggcagcatttactcagaaaggtaacctcctccgccacattaaactg

SEQ ID NO: 754 - DNA, 66 bp, Synthetic construct
  source 1..66: mol_type = other DNA
ttcatgtgtgaaatctgtggggcatcatttactcagaaaggtaacctcctccgccacattaaactg

SEQ ID NO: 755 - DNA, 66 bp, Synthetic construct
  source 1..66: mol_type = other DNA
ctcaactgccccatctgcgggtttagctgcactcagaaaggtaacctcctccgccacattaaactg

SEQ ID NO: 756 - DNA, 66 bp, Synthetic construct
  source 1..66: mol_type = other DNA
ttccattgtgagatctgtggggcaccatttactcagaaaggtaacctcctccgccacattaaactg

SEQ ID NO: 757 - DNA, 66 bp, Synthetic construct
  source 1..66: mol_type = other DNA
ttcttctgtgaggtgtgtggggcaccctttactcagaaaggtaacctcctccgccacattaaactg

SEQ ID NO: 758 - DNA, 66 bp, Synthetic construct
  source 1..66: mol_type = other DNA
ttctggtgtgaaatctgtggggcaaagtttactcagaaaggtaacctcctccgccacattaaactg

SEQ ID NO: 759 - DNA, 66 bp, Synthetic construct
  source 1..66: mol_type = other DNA
ttcttctgtgacatatgtggggcaccctttactcagaaaggtaacctcctccgccacattaaactg

SEQ ID NO: 760 - DNA, 66 bp, Synthetic construct
  source 1..66: mol_type = other DNA
ttcgcttgtgaagtgtgtggggcaaaatttactcagaaaggtaacctcctccgccacattaaactg

SEQ ID NO: 761 - DNA, 66 bp, Synthetic construct; identical to SEQ ID NO: 697
  source 1..66: mol_type = other DNA

SEQ ID NO: 762 - DNA, 66 bp, Synthetic construct
  source 1..66: mol_type = other DNA
ttcgcctgtgaggtgtgtggggcaagatttactcagaaaggtaacctcctccgccacattaaactg

SEQ ID NO: 763 - DNA, 66 bp, Synthetic construct
  source 1..66: mol_type = other DNA
ttctactgtgagatctgtggggcaaaatttactcagaaaggtaacctcctccgccacattaaactg

SEQ ID NO: 764 - DNA, 66 bp, Synthetic construct
  source 1..66: mol_type = other DNA
ttcggctgtcccatttgtggggcatgttttactcagaaaggtaacctcctccgccacattaaactg

SEQ ID NO: 765 - DNA, 66 bp, Synthetic construct
  source 1..66: mol_type = other DNA
ttcgcatgtgagatctgtggggcagcctttactcagaaaggtaacctcctccgccacattaaactg

SEQ ID NO: 766 - DNA, 66 bp, Synthetic construct
  source 1..66: mol_type = other DNA
ttcggatgtcccgtctgtggggcatgctttactcagaaaggtaacctcctccgccacattaaactg

SEQ ID NO: 767 - DNA, 66 bp, Synthetic construct
  source 1..66: mol_type = other DNA
ttctactgtgaagtctgtggggcagcttttactcagaaaggtaacctcctccgccacattaaactg

SEQ ID NO: 768 - DNA, 66 bp, Synthetic construct
  source 1..66: mol_type = other DNA
ttcgcttgtgaggtgtgtggggcaagttttactcagaaaggtaacctcctccgccacattaaactg

SEQ ID NO: 769 - DNA, 66 bp, Synthetic construct
  source 1..66: mol_type = other DNA
ttctactgtaatatttgtggggcaccatttactcagaaaggtaacctcctccgccacattaaactg

SEQ ID NO: 770 - DNA, 66 bp, Synthetic construct
  source 1..66: mol_type = other DNA
ttctattgtgatatatgtggggcaccgtttactcagaaaggtaacctcctccgccacattaaactg

SEQ ID NO: 771 - DNA, 66 bp, Synthetic construct; identical to SEQ ID NO: 498
  source 1..66: mol_type = other DNA

SEQ ID NO: 772 - DNA, 66 bp, Synthetic construct
  source 1..66: mol_type = other DNA
ttcgggtgtgaggtgtgtggggcacgatttactcagaaaggtaacctcctccgccacattaaactg

SEQ ID NO: 773 - DNA, 66 bp, Synthetic construct
  source 1..66: mol_type = other DNA
ttcggatgtccggtttgtggggcaatgtttactcagaaaggtaacctcctccgccacattaaactg

SEQ ID NO: 774 - DNA, 66 bp, Synthetic construct
  source 1..66: mol_type = other DNA
ttctggtgtgagatctgtggggcatgctttactcagaaaggtaacctcctccgccacattaaactg

SEQ ID NO: 775 - DNA, 66 bp, Synthetic construct
  source 1..66: mol_type = other DNA
ttcgcttgtgagatctgtggggcacgatttactcagaaaggtaacctcctccgccacattaaactg

SEQ ID NO: 776 - DNA, 66 bp, Synthetic construct
  source 1..66: mol_type = other DNA
ttctactgtgaggtctgtggggcaaggtttactcagaaaggtaacctcctccgccacattaaactg

SEQ ID NO: 777 - DNA, 66 bp, Synthetic construct
  source 1..66: mol_type = other DNA
ttctggtgtgagatttgtggggcatcttttactcagaaaggtaacctcctccgccacattaaactg

SEQ ID NO: 778 - DNA, 66 bp, Synthetic construct
  source 1..66: mol_type = other DNA
ttcttctgtaacatctgtggggcaccttttactcagaaaggtaacctcctccgccacattaaactg

SEQ ID NO: 779 - DNA, 66 bp, Synthetic construct
  source 1..66: mol_type = other DNA
ttcgcttgtgagatctgtggggcaaaatttactcagaaaggtaacctcctccgccacattaaactg

SEQ ID NO: 780 - DNA, 66 bp, Synthetic construct
  source 1..66: mol_type = other DNA
ttctggtgtgaaatttgtggggcaccatttactcagaaaggtaacctcctccgccacattaaactg

SEQ ID NO: 781 - DNA, 66 bp, Synthetic construct
  source 1..66: mol_type = other DNA
ttcggttgtccggtgtgtggggcaaaatttactcagaaaggtaacctcctccgccacattaaactg

SEQ ID NO: 782 - DNA, 66 bp, Synthetic construct
  source 1..66: mol_type = other DNA
ttcggttgtcccatctgtggggcaatttttactcagaaaggtaacctcctccgccacattaaactg

SEQ ID NO: 783 - DNA, 66 bp, Synthetic construct
  source 1..66: mol_type = other DNA
ttcgggtgtccagtttgtggggcacagtttactcagaaaggtaacctcctccgccacattaaactg

SEQ ID NO: 784 - DNA, 66 bp, Synthetic construct; identical to SEQ ID NO: 632
  source 1..66: mol_type = other DNA

SEQ ID NO: 785 - DNA, 66 bp, Synthetic construct
  source 1..66: mol_type = other DNA
ttcttttgtgaaatctgtggggcatgctttactcagaaaggtaacctcctccgccacattaaactg

SEQ ID NO: 786 - DNA, 66 bp, Synthetic construct
  source 1..66: mol_type = other DNA
ttcttttgtgagatttgtggggcaaaatttactcagaaaggtaacctcctccgccacattaaactg

SEQ ID NO: 787 - DNA, 66 bp, Synthetic construct
  source 1..66: mol_type = other DNA
ttctggtgtgaggtgtgtggggcatcctttactcagaaaggtaacctcctccgccacattaaactg

SEQ ID NO: 788 - DNA, 66 bp, Synthetic construct
  source 1..66: mol_type = other DNA
ttctggtgtgaaatttgtggggcagcttttactcagaaaggtaacctcctccgccacattaaactg

SEQ ID NO: 789 - DNA, 66 bp, Synthetic construct
  source 1..66: mol_type = other DNA
ttcgcatgtgaggtgtgtggggcatgctttactcagaaaggtaacctcctccgccacattaaactg

SEQ ID NO: 790 - DNA, 66 bp, Synthetic construct
  source 1..66: mol_type = other DNA
ttcgcttgtgaaatatgtggggcaggatttactcagaaaggtaacctcctccgccacattaaactg

SEQ ID NO: 791 - DNA, 66 bp, Synthetic construct
  source 1..66: mol_type = other DNA
ttcggctgtcccatctgtggggcaccttttactcagaaaggtaacctcctccgccacattaaactg

SEQ ID NO: 792 - DNA, 66 bp, Synthetic construct
  source 1..66: mol_type = other DNA
ttctactgtgaggtgtgtggggcatgctttactcagaaaggtaacctcctccgccacattaaactg

SEQ ID NO: 793 - DNA, 66 bp, Synthetic construct
  source 1..66: mol_type = other DNA
ttctggtgtgaagtgtgtggggcaaaatttactcagaaaggtaacctcctccgccacattaaactg

SEQ ID NO: 794 - DNA, 66 bp, Synthetic construct
  source 1..66: mol_type = other DNA
ttctactgtgaaatttgtggggcaaattttactcagaaaggtaacctcctccgccacattaaactg

SEQ ID NO: 795 - DNA, 66 bp, Synthetic construct
  source 1..66: mol_type = other DNA
ctgggctgtccaatctgcgggtttcaatgcactcagaaaggtaacctcctccgccacattaaactg

SEQ ID NO: 796 - DNA, 66 bp, Synthetic construct
  source 1..66: mol_type = other DNA
ttcggatgtcccgtctgtggggcaatatttactcagaaaggtaacctcctccgccacattaaactg

SEQ ID NO: 797 - DNA, 66 bp, Synthetic construct
  source 1..66: mol_type = other DNA
ttcgcctgtcctatctgtggggcatcatttactcagaaaggtaacctcctccgccacattaaactg

SEQ ID NO: 798 - DNA, 66 bp, Synthetic construct; identical to SEQ ID NO: 378
  source 1..66: mol_type = other DNA

SEQ ID NO: 799 - DNA, 66 bp, Synthetic construct
  source 1..66: mol_type = other DNA
ttcgcatgtcccatatgtggggcagcttttactcagaaaggtaacctcctccgccacattaaactg

SEQ ID NO: 800 - DNA, 66 bp, Synthetic construct
  source 1..66: mol_type = other DNA
ttctattgtgagatatgtggggcatgctttactcagaaaggtaacctcctccgccacattaaactg

SEQ ID NO: 801 - DNA, 66 bp, Synthetic construct
  source 1..66: mol_type = other DNA
ttcgcatgtcctatttgtggggcacgatttactcagaaaggtaacctcctccgccacattaaactg

SEQ ID NO: 802 - DNA, 66 bp, Synthetic construct; identical to SEQ ID NO: 486
  source 1..66: mol_type = other DNA

SEQ ID NO: 803 - DNA, 66 bp, Synthetic construct
  source 1..66: mol_type = other DNA
ttctattgtgagatctgtggggcatcttttactcagaaaggtaacctcctccgccacattaaactg

SEQ ID NO: 804 - DNA, 66 bp, Synthetic construct
  source 1..66: mol_type = other DNA
ttcgcgtgtgaaatttgtggggcatgttttactcagaaaggtaacctcctccgccacattaaactg

SEQ ID NO: 805 - DNA, 66 bp, Synthetic construct; identical to SEQ ID NO: 569
  source 1..66: mol_type = other DNA

SEQ ID NO: 806 - DNA, 66 bp, Synthetic construct
  source 1..66: mol_type = other DNA
ttctactgtgaaatctgtggggcaagatttactcagaaaggtaacctcctccgccacattaaactg

SEQ ID NO: 807 - DNA, 66 bp, Synthetic construct; identical to SEQ ID NO: 399
  source 1..66: mol_type = other DNA

SEQ ID NO: 808 - DNA, 66 bp, Synthetic construct
  source 1..66: mol_type = other DNA
ttctactgtgaagtttgtggggcaagctttactcagaaaggtaacctcctccgccacattaaactg

SEQ ID NO: 809 - DNA, 66 bp, Synthetic construct
  source 1..66: mol_type = other DNA
ttctactgtgaagtatgtggggcaccatttactcagaaaggtaacctcctccgccacattaaactg

SEQ ID NO: 810 - DNA, 66 bp, Synthetic construct
  source 1..66: mol_type = other DNA
ttcgggtgtgaagtctgtggggcaaagtttactcagaaaggtaacctcctccgccacattaaactg

SEQ ID NO: 811 - DNA, 66 bp, Synthetic construct; identical to SEQ ID NO: 270
  source 1..66: mol_type = other DNA

SEQ ID NO: 812 - DNA, 66 bp, Synthetic construct; identical to SEQ ID NO: 19
  source 1..66: mol_type = other DNA

SEQ ID NO: 813 - DNA, 66 bp, Synthetic construct; identical to SEQ ID NO: 418
  source 1..66: mol_type = other DNA

SEQ ID NO: 814 - DNA, 66 bp, Synthetic construct
  source 1..66: mol_type = other DNA
ttctgctgtgaaatctgtggggcaggttttactcagaaaggtaacctcctccgccacattaaactg

SEQ ID NO: 815 - DNA, 66 bp, Synthetic construct
  source 1..66: mol_type = other DNA
ttaggatgcccaatttgcggtttcaaatgtactcagaaaggtaacctcctccgccacattaaactg

SEQ ID NO: 816 - DNA, 66 bp, Synthetic construct
  source 1..66: mol_type = other DNA
ttcttctgtgagatctgtggggcacagtttactcagaaaggtaacctcctccgccacattaaactg

SEQ ID NO: 817 - DNA, 66 bp, Synthetic construct
  source 1..66: mol_type = other DNA
ttcgcctgtgagatctgtggggcatcatttactcagaaaggtaacctcctccgccacattaaactg

SEQ ID NO: 818 - DNA, 66 bp, Synthetic construct
  source 1..66: mol_type = other DNA
ctgtggtgcgagatctgcggcttcagctgtactcagaaaggtaacctcctccgccacattaaactg

SEQ ID NO: 819 - DNA, 66 bp, Synthetic construct
  source 1..66: mol_type = other DNA
ttcggctgtccggtgtgtggggcaacgtttactcagaaaggtaacctcctccgccacattaaactg

SEQ ID NO: 820 - DNA, 66 bp, Synthetic construct
  source 1..66: mol_type = other DNA
ttctactgtgagatatgtggggcagtatttactcagaaaggtaacctcctccgccacattaaactg

SEQ ID NO: 821 - DNA, 66 bp, Synthetic construct; identical to SEQ ID NO: 327
  source 1..66: mol_type = other DNA

SEQ ID NO: 822 - DNA, 66 bp, Synthetic construct
  source 1..66: mol_type = other DNA
ttcgcctgtgagatttgtggggcacaatttactcagaaaggtaacctcctccgccacattaaactg

SEQ ID NO: 823 - DNA, 66 bp, Synthetic construct
  source 1..66: mol_type = other DNA
ttcttttgtgaggtgtgtggggcaggatttactcagaaaggtaacctcctccgccacattaaactg

SEQ ID NO: 824 - DNA, 66 bp, Synthetic construct
  source 1..66: mol_type = other DNA
ctggggtgtccaatatgcggatttacctgcactcagaaaggtaacctcctccgccacattaaactg

SEQ ID NO: 825 - DNA, 66 bp, Synthetic construct; identical to SEQ ID NO: 391
  source 1..66: mol_type = other DNA

SEQ ID NO: 826 - DNA, 66 bp, Synthetic construct
  source 1..66: mol_type = other DNA
ttctattgtgagatatgtggggcagggtttactcagaaaggtaacctcctccgccacattaaactg

SEQ ID NO: 827 - DNA, 66 bp, Synthetic construct
  source 1..66: mol_type = other DNA
ttctggtgtgaagtctgtggggcatgctttactcagaaaggtaacctcctccgccacattaaactg

SEQ ID NO: 828 - DNA, 66 bp, Synthetic construct
  source 1..66: mol_type = other DNA
ttcgcctgtgaggtctgtggggcagcctttactcagaaaggtaacctcctccgccacattaaactg

SEQ ID NO: 829 - DNA, 66 bp, Synthetic construct; identical to SEQ ID NO: 439
  source 1..66: mol_type = other DNA

SEQ ID NO: 830 - DNA, 66 bp, Synthetic construct
  source 1..66: mol_type = other DNA
ttccattgtaacatatgtggggcaccttttactcagaaaggtaacctcctccgccacattaaactg

SEQ ID NO: 831 - DNA, 66 bp, Synthetic construct
  source 1..66: mol_type = other DNA
ttctggtgtgaaatctgtggggcaggctttactcagaaaggtaacctcctccgccacattaaactg

SEQ ID NO: 832 - DNA, 66 bp, Synthetic construct; identical to SEQ ID NO: 589
  source 1..66: mol_type = other DNA

SEQ ID NO: 833 - DNA, 66 bp, Synthetic construct; identical to SEQ ID NO: 631
  source 1..66: mol_type = other DNA

SEQ ID NO: 834 - DNA, 66 bp, Synthetic construct; identical to SEQ ID NO: 491
  source 1..66: mol_type = other DNA

SEQ ID NO: 835 - DNA, 66 bp, Synthetic construct; identical to SEQ ID NO: 723
  source 1..66: mol_type = other DNA

SEQ ID NO: 836 - DNA, 66 bp, Synthetic construct
  source 1..66: mol_type = other DNA
ttctactgtgagatatgtggggcaatgtttactcagaaaggtaacctcctccgccacattaaactg

SEQ ID NO: 837 - DNA, 66 bp, Synthetic construct
  source 1..66: mol_type = other DNA
cttggctgcccaatttgcgggttctcttgtactcagaaaggtaacctcctccgccacattaaactg

SEQ ID NO: 838 - DNA, 66 bp, Synthetic construct; identical to SEQ ID NO: 53
  source 1..66: mol_type = other DNA

SEQ ID NO: 839 - DNA, 66 bp, Synthetic construct
  source 1..66: mol_type = other DNA
ttcgcctgtcccatatgtggggcaggatttactcagaaaggtaacctcctccgccacattaaactg

SEQ ID NO: 840 - DNA, 66 bp, Synthetic construct
  source 1..66: mol_type = other DNA
ttctactgtgagatttgtggggcacactttactcagaaaggtaacctcctccgccacattaaactg

SEQ ID NO: 841 - DNA, 66 bp, Synthetic construct
  source 1..66: mol_type = other DNA
ttcgcatgtgaaatatgtggggcaccatttactcagaaaggtaacctcctccgccacattaaactg

SEQ ID NO: 842 - DNA, 66 bp, Synthetic construct
  source 1..66: mol_type = other DNA
ttcttttgtgagatctgtggggcaagctttactcagaaaggtaacctcctccgccacattaaactg

SEQ ID NO: 843 - DNA, 66 bp, Synthetic construct
  source 1..66: mol_type = other DNA
ttatactgcgagatatgcggcttcaaatgcactcagaaaggtaacctcctccgccacattaaactg

SEQ ID NO: 844 - DNA, 66 bp, Synthetic construct
  source 1..66: mol_type = other DNA
ttcgggtgtccggtctgtggggcaaggtttactcagaaaggtaacctcctccgccacattaaactg

SEQ ID NO: 845 - DNA, 66 bp, Synthetic construct; identical to SEQ ID NO: 675
  source 1..66: mol_type = other DNA

SEQ ID NO: 846 - DNA, 66 bp, Synthetic construct; identical to SEQ ID NO: 404
  source 1..66: mol_type = other DNA

SEQ ID NO: 847 - DNA, 66 bp, Synthetic construct; identical to SEQ ID NO: 506
  source 1..66: mol_type = other DNA

SEQ ID NO: 848 - DNA, 66 bp, Synthetic construct; identical to SEQ ID NO: 751
  source 1..66: mol_type = other DNA

SEQ ID NO: 849 - DNA, 66 bp, Synthetic construct
  source 1..66: mol_type = other DNA
ttcgcctgtcctgtgtgtggggcagcatttactcagaaaggtaacctcctccgccacattaaactg

SEQ ID NO: 850 - DNA, 66 bp, Synthetic construct; identical to SEQ ID NO: 264
  source 1..66: mol_type = other DNA

SEQ ID NO: 851 - DNA, 66 bp, Synthetic construct
  source 1..66: mol_type = other DNA
ttcggctgtcccatttgtggggcaaaatttactcagaaaggtaacctcctccgccacattaaactg

SEQ ID NO: 852 - DNA, 66 bp, Synthetic construct
  source 1..66: mol_type = other DNA
ttctattgtgaaatctgtggggcagcctttactcagaaaggtaacctcctccgccacattaaactg

SEQ ID NO: 853 - DNA, 66 bp, Synthetic construct
  source 1..66: mol_type = other DNA
ttctggtgtccaatctgtggggcatgctttactcagaaaggtaacctcctccgccacattaaactg

SEQ ID NO: 854 - DNA, 66 bp, Synthetic construct
  source 1..66: mol_type = other DNA
ttctactgtgaggtgtgtggggcagtgtttactcagaaaggtaacctcctccgccacattaaactg

SEQ ID NO: 855 - DNA, 66 bp, Synthetic construct
  source 1..66: mol_type = other DNA
ttcttttgtgacatttgtggggcaagatttactcagaaaggtaacctcctccgccacattaaactg

SEQ ID NO: 856 - DNA, 66 bp, Synthetic construct
  source 1..66: mol_type = other DNA
ttcggctgtccaatttgtggggcacagtttactcagaaaggtaacctcctccgccacattaaactg

SEQ ID NO: 857 - DNA, 66 bp, Synthetic construct
  source 1..66: mol_type = other DNA
ttcgggtgtgaagtttgtggggcatgttttactcagaaaggtaacctcctccgccacattaaactg

SEQ ID NO: 858 - DNA, 66 bp, Synthetic construct; identical to SEQ ID NO: 619
  source 1..66: mol_type = other DNA

SEQ ID NO: 859 - DNA, 66 bp, Synthetic construct
  source 1..66: mol_type = other DNA
ttctactgtgagatctgtggggcaacatttactcagaaaggtaacctcctccgccacattaaactg

SEQ ID NO: 860 - DNA, 66 bp, Synthetic construct
  source 1..66: mol_type = other DNA
ttcagctgtgaagtgtgtggggcaagttttactcagaaaggtaacctcctccgccacattaaactg

SEQ ID NO: 861 - DNA, 66 bp, Synthetic construct; identical to SEQ ID NO: 612
  source 1..66: mol_type = other DNA

SEQ ID NO: 862 - DNA, 66 bp, Synthetic construct; identical to SEQ ID NO: 545
  source 1..66: mol_type = other DNA

SEQ ID NO: 863 - DNA, 66 bp, Synthetic construct
  source 1..66: mol_type = other DNA
ttcgggtgtcccatatgtggggcagcttttactcagaaaggtaacctcctccgccacattaaactg

SEQ ID NO: 864 - DNA, 66 bp, Synthetic construct
  source 1..66: mol_type = other DNA
ttctcgtgtgagatctgtggggcatcgtttactcagaaaggtaacctcctccgccacattaaactg

SEQ ID NO: 865 - DNA, 66 bp, Synthetic construct; identical to SEQ ID NO: 284
  source 1..66: mol_type = other DNA

SEQ ID NO: 866 - DNA, 66 bp, Synthetic construct; identical to SEQ ID NO: 655
  source 1..66: mol_type = other DNA

SEQ ID NO: 867 - DNA, 66 bp, Synthetic construct
  source 1..66: mol_type = other DNA
ttgtattgtcccatttgtggcttttgttgtactcagaaaggtaacctcctccgccacattaaactg

SEQ ID NO: 868 - DNA, 66 bp, Synthetic construct
  source 1..66: mol_type = other DNA
ttcgggtgtcctatctgtggggcagtgtttactcagaaaggtaacctcctccgccacattaaactg

SEQ ID NO: 869 - DNA, 66 bp, Synthetic construct
  source 1..66: mol_type = other DNA
ttcggctgtccggtgtgtggggcagtgtttactcagaaaggtaacctcctccgccacattaaactg

SEQ ID NO: 870 - DNA, 66 bp, Synthetic construct
  source 1..66: mol_type = other DNA
ctctggtgtgaaatttgcggattcacctgcactcagaaaggtaacctcctccgccacattaaactg

SEQ ID NO: 871 - DNA, 66 bp, Synthetic construct
  source 1..66: mol_type = other DNA
ctgtattgtgaaatttgcggctttcgctgcactcagaaaggtaacctcctccgccacattaaactg

SEQ ID NO: 872 - DNA, 66 bp, Synthetic construct
  source 1..66: mol_type = other DNA
ttcttctgtgaggtgtgtggggcatgctttactcagaaaggtaacctcctccgccacattaaactg

SEQ ID NO: 873 - DNA, 66 bp, Synthetic construct; identical to SEQ ID NO: 334
  source 1..66: mol_type = other DNA

SEQ ID NO: 874 - DNA, 66 bp, Synthetic construct
  source 1..66: mol_type = other DNA
ttcttctgtgagatctgtggggcagcttttactcagaaaggtaacctcctccgccacattaaactg

SEQ ID NO: 875 - DNA, 66 bp, Synthetic construct
  source 1..66: mol_type = other DNA
ttctactgtgaaatctgtggggcagagtttactcagaaaggtaacctcctccgccacattaaactg

SEQ ID NO: 876 - DNA, 66 bp, Synthetic construct
  source 1..66: mol_type = other DNA
ttcgcctgtcccgtgtgtggggcaagctttactcagaaaggtaacctcctccgccacattaaactg

SEQ ID NO: 877 - DNA, 66 bp, Synthetic construct
  source 1..66: mol_type = other DNA
ttccactgtgaggtgtgtggggcaccttttactcagaaaggtaacctcctccgccacattaaactg

SEQ ID NO: 878 - DNA, 66 bp, Synthetic construct; identical to SEQ ID NO: 735
  source 1..66: mol_type = other DNA

SEQ ID NO: 879 - DNA, 66 bp, Synthetic construct
  source 1..66: mol_type = other DNA
ttctcctgtgagatttgtggggcaccctttactcagaaaggtaacctcctccgccacattaaactg

SEQ ID NO: 880 - DNA, 66 bp, Synthetic construct; identical to SEQ ID NO: 688
  source 1..66: mol_type = other DNA

SEQ ID NO: 881 - DNA, 66 bp, Synthetic construct
  source 1..66: mol_type = other DNA
ttcttttgtccagtgtgtggggcaccttttactcagaaaggtaacctcctccgccacattaaactg

SEQ ID NO: 882 - DNA, 66 bp, Synthetic construct
  source 1..66: mol_type = other DNA
ttcttttgtgaggtgtgtggggcaaaatttactcagaaaggtaacctcctccgccacattaaactg

SEQ ID NO: 883 - DNA, 66 bp, Synthetic construct; identical to SEQ ID NO: 702
  source 1..66: mol_type = other DNA

SEQ ID NO: 884 - DNA, 66 bp, Synthetic construct
  source 1..66: mol_type = other DNA
ttcttttgtgaaatctgtggggcaaggtttactcagaaaggtaacctcctccgccacattaaactg

SEQ ID NO: 885 - DNA, 66 bp, Synthetic construct
  source 1..66: mol_type = other DNA
ctctattgcgagatctgtggatttcagtgtactcagaaaggtaacctcctccgccacattaaactg

SEQ ID NO: 886 - DNA, 66 bp, Synthetic construct
  source 1..66: mol_type = other DNA
ttctattgtgaggtttgtggggcacaatttactcagaaaggtaacctcctccgccacattaaactg

SEQ ID NO: 887 - DNA, 66 bp, Synthetic construct
  source 1..66: mol_type = other DNA
ttcgcttgtgaaatttgtggggcaatatttactcagaaaggtaacctcctccgccacattaaactg

SEQ ID NO: 888 - DNA, 66 bp, Synthetic construct
  source 1..66: mol_type = other DNA
ttcttctgtgaaatttgtggggcagggtttactcagaaaggtaacctcctccgccacattaaactg

SEQ ID NO: 889 - DNA, 66 bp, Synthetic construct
  source 1..66: mol_type = other DNA
ttccattgtgaaatctgtggggcaggctttactcagaaaggtaacctcctccgccacattaaactg

SEQ ID NO: 890 - DNA, 66 bp, Synthetic construct
  source 1..66: mol_type = other DNA
ctcgcttgtgaaatttgtggtttcagatgtactcagaaaggtaacctcctccgccacattaaactg

SEQ ID NO: 891 - DNA, 66 bp, Synthetic construct
  source 1..66: mol_type = other DNA
ttcttttgtgacgtgtgtggggcacgttttactcagaaaggtaacctcctccgccacattaaactg

SEQ ID NO: 892 - DNA, 66 bp, Synthetic construct
  source 1..66: mol_type = other DNA
ttctattgtcctatctgtggggcatgctttactcagaaaggtaacctcctccgccacattaaactg

SEQ ID NO: 893 - DNA, 66 bp, Synthetic construct
  source 1..66: mol_type = other DNA
ttcggctgtgagatctgtggggcaaagtttactcagaaaggtaacctcctccgccacattaaactg

SEQ ID NO: 894 - DNA, 66 bp, Synthetic construct
  source 1..66: mol_type = other DNA
ttcgcctgtcctgtctgtggggcacggtttactcagaaaggtaacctcctccgccacattaaactg

SEQ ID NO: 895 - DNA, 66 bp, Synthetic construct
  source 1..66: mol_type = other DNA
ttcgcatgtgaggtgtgtggggcacagtttactcagaaaggtaacctcctccgccacattaaactg

SEQ ID NO: 896 - DNA, 66 bp, Synthetic construct
  source 1..66: mol_type = other DNA
ttctattgtgaagtatgtggggcaaagtttactcagaaaggtaacctcctccgccacattaaactg

SEQ ID NO: 897 - DNA, 66 bp, Synthetic construct; identical to SEQ ID NO: 504
  source 1..66: mol_type = other DNA

SEQ ID NO: 898 - DNA, 66 bp, Synthetic construct
  source 1..66: mol_type = other DNA
ttcggctgtgagatatgtggggcacagtttactcagaaaggtaacctcctccgccacattaaactg

SEQ ID NO: 899 - DNA, 66 bp, Synthetic construct
  source 1..66: mol_type = other DNA
ttagcctgcgagatctgcgggtttacctgtactcagaaaggtaacctcctccgccacattaaactg

SEQ ID NO: 900 - DNA, 66 bp, Synthetic construct
  source 1..66: mol_type = other DNA
ttcgcctgtcctatttgtggggcatgctttactcagaaaggtaacctcctccgccacattaaactg

SEQ ID NO: 901 - DNA, 66 bp, Synthetic construct
  source 1..66: mol_type = other DNA
ttctattgtccagtgtgtggggcaccttttactcagaaaggtaacctcctccgccacattaaactg

SEQ ID NO: 902 - DNA, 66 bp, Synthetic construct
  source 1..66: mol_type = other DNA
ttcttctgtgaggtttgtggggcagcttttactcagaaaggtaacctcctccgccacattaaactg

SEQ ID NO: 903 - DNA, 66 bp, Synthetic construct
  source 1..66: mol_type = other DNA
ttcggctgccctatttgcggccgcattttcactcagaaaggtaacctcctccgccacattaaactg

SEQ ID NO: 904 - DNA, 66 bp, Synthetic construct
  source 1..66: mol_type = other DNA
ttcgcttgtgatatctgtggggcaccttttactcagaaaggtaacctcctccgccacattaaactg

SEQ ID NO: 905 - DNA, 66 bp, Synthetic construct
  source 1..66: mol_type = other DNA
ttcaattgtgagatctgtggggcaggctttactcagaaaggtaacctcctccgccacattaaactg

SEQ ID NO: 906 - DNA, 66 bp, Synthetic construct
  source 1..66: mol_type = other DNA
ttcggatgtcccatctgtggggcaacatttactcagaaaggtaacctcctccgccacattaaactg

SEQ ID NO: 907 - DNA, 66 bp, Synthetic construct
  source 1..66: mol_type = other DNA
ttcgcgtgtgacatttgtggggcacgatttactcagaaaggtaacctcctccgccacattaaactg

SEQ ID NO: 908 - DNA, 66 bp, Synthetic construct
  source 1..66: mol_type = other DNA
ttcttttgtgagatctgtggggcagtgtttactcagaaaggtaacctcctccgccacattaaactg

SEQ ID NO: 909 - DNA, 66 bp, Synthetic construct
  source 1..66: mol_type = other DNA
ttctggtgtgagatctgtggggcacactttactcagaaaggtaacctcctccgccacattaaactg

SEQ ID NO: 910 - DNA, 66 bp, Synthetic construct; identical to SEQ ID NO: 40
  source 1..66: mol_type = other DNA

SEQ ID NO: 911 - DNA, 66 bp, Synthetic construct; identical to SEQ ID NO: 552
  source 1..66: mol_type = other DNA

SEQ ID NO: 912 - DNA, 66 bp, Synthetic construct
  source 1..66: mol_type = other DNA
ctctactgccctatttgcgggttccagtgcactcagaaaggtaacctcctccgccacattaaactg

SEQ ID NO: 913 - DNA, 66 bp, Synthetic construct
  source 1..66: mol_type = other DNA
ttcttttgtgaagtctgtggggcaagctttactcagaaaggtaacctcctccgccacattaaactg

SEQ ID NO: 914 - DNA, 66 bp, Synthetic construct; identical to SEQ ID NO: 740
  source 1..66: mol_type = other DNA

SEQ ID NO: 915 - DNA, 66 bp, Synthetic construct
  source 1..66: mol_type = other DNA
cttgcctgcccaatttgtgggtttcagtgcactcagaaaggtaacctcctccgccacattaaactg

SEQ ID NO: 916 - DNA, 66 bp, Synthetic construct; identical to SEQ ID NO: 69
  source 1..66: mol_type = other DNA

SEQ ID NO: 917 - DNA, 66 bp, Synthetic construct; identical to SEQ ID NO: 603
  source 1..66: mol_type = other DNA

SEQ ID NO: 918 - DNA, 66 bp, Synthetic construct
  source 1..66: mol_type = other DNA
ttcaattgtgagatatgtggggcaagttttactcagaaaggtaacctcctccgccacattaaactg

SEQ ID NO: 919 - DNA, 66 bp, Synthetic construct; identical to SEQ ID NO: 695
  source 1..66: mol_type = other DNA

SEQ ID NO: 920 - DNA, 66 bp, Synthetic construct
  source 1..66: mol_type = other DNA
ttcgcgtgtcccatctgtggggcaaagtttactcagaaaggtaacctcctccgccacattaaactg

SEQ ID NO: 921 - DNA, 66 bp, Synthetic construct
  source 1..66: mol_type = other DNA
ttctactgtgaaatttgtggggcaatctttactcagaaaggtaacctcctccgccacattaaactg

SEQ ID NO: 922 - DNA, 66 bp, Synthetic construct
  source 1..66: mol_type = other DNA
ttctggtgtgaaatttgtggggcacgttttactcagaaaggtaacctcctccgccacattaaactg

SEQ ID NO: 923 - DNA, 66 bp, Synthetic construct
  source 1..66: mol_type = other DNA
ttcgcttgtcccgtttgtggggcagggtttactcagaaaggtaacctcctccgccacattaaactg

SEQ ID NO: 924 - DNA, 66 bp, Synthetic construct
  source 1..66: mol_type = other DNA
ctgggctgtcctatctgtggatttatgtgcactcagaaaggtaacctcctccgccacattaaactg

SEQ ID NO: 925 - DNA, 66 bp, Synthetic construct
  source 1..66: mol_type = other DNA
ttcgcctgtgatatctgtggggcagcttttactcagaaaggtaacctcctccgccacattaaactg

SEQ ID NO: 926 - DNA, 66 bp, Synthetic construct; identical to SEQ ID NO: 611
  source 1..66: mol_type = other DNA

SEQ ID NO: 927 - DNA, 66 bp, Synthetic construct
  source 1..66: mol_type = other DNA
ttctggtgtgagatatgtggggcaaattttactcagaaaggtaacctcctccgccacattaaactg

SEQ ID NO: 928 - DNA, 66 bp, Synthetic construct
  source 1..66: mol_type = other DNA
ttcttttgtgacatttgtggggcacaatttactcagaaaggtaacctcctccgccacattaaactg

SEQ ID NO: 929 - DNA, 66 bp, Synthetic construct
  source 1..66: mol_type = other DNA
ctggcgtgtgaaatttgtggattcagttgcactcagaaaggtaacctcctccgccacattaaactg

SEQ ID NO: 930 - DNA, 66 bp, Synthetic construct
  source 1..66: mol_type = other DNA
ttcttttgtgaaatctgtggggcaccctttactcagaaaggtaacctcctccgccacattaaactg

SEQ ID NO: 931 - DNA, 66 bp, Synthetic construct
  source 1..66: mol_type = other DNA
ttcgcctgtgaagtatgtggggcaggctttactcagaaaggtaacctcctccgccacattaaactg

SEQ ID NO: 932 - DNA, 66 bp, Synthetic construct
  source 1..66: mol_type = other DNA
ttcggctgtgaaatctgtggggcatgctttactcagaaaggtaacctcctccgccacattaaactg

SEQ ID NO: 933 - DNA, 66 bp, Synthetic construct
  source 1..66: mol_type = other DNA
ttctggtgtccggtttgtggggcatgctttactcagaaaggtaacctcctccgccacattaaactg

SEQ ID NO: 934 - DNA, 66 bp, Synthetic construct
  source 1..66: mol_type = other DNA
ttctattgtgaagtttgtggggcagagtttactcagaaaggtaacctcctccgccacattaaactg

SEQ ID NO: 935 - DNA, 66 bp, Synthetic construct
  source 1..66: mol_type = other DNA
ttcttctgtgagatctgtggggcaatttttactcagaaaggtaacctcctccgccacattaaactg

SEQ ID NO: 936 - DNA, 66 bp, Synthetic construct
  source 1..66: mol_type = other DNA
ctggcgtgtgaaatctgtggctttaagtgcactcagaaaggtaacctcctccgccacattaaactg

SEQ ID NO: 937 - DNA, 66 bp, Synthetic construct
  source 1..66: mol_type = other DNA
ttcgcatgtcctgtgtgtggggcaaaatttactcagaaaggtaacctcctccgccacattaaactg

SEQ ID NO: 938 - DNA, 66 bp, Synthetic construct
  source 1..66: mol_type = other DNA
ttcgggtgtccaatttgtggggcacgctttactcagaaaggtaacctcctccgccacattaaactg

SEQ ID NO: 939 - DNA, 66 bp, Synthetic construct; identical to SEQ ID NO: 380
  source 1..66: mol_type = other DNA

SEQ ID NO: 940 - DNA, 66 bp, Synthetic construct
  source 1..66: mol_type = other DNA
ttcaattgtgaaatatgtggggcaccttttactcagaaaggtaacctcctccgccacattaaactg

SEQ ID NO: 941 - DNA, 66 bp, Synthetic construct
  source 1..66: mol_type = other DNA
ctttggtgtgaaatctgcggattcagatgtactcagaaaggtaacctcctccgccacattaaactg

SEQ ID NO: 942 - DNA, 66 bp, Synthetic construct
  source 1..66: mol_type = other DNA
ttcgcctgtccaatatgtggggcaacttttactcagaaaggtaacctcctccgccacattaaactg

SEQ ID NO: 943 - DNA, 66 bp, Synthetic construct
  source 1..66: mol_type = other DNA
ttcggctgtccggtgtgtggggcatcatttactcagaaaggtaacctcctccgccacattaaactg

SEQ ID NO: 944 - DNA, 66 bp, Synthetic construct
  source 1..66: mol_type = other DNA
ttctcttgtgagatctgtggggcaggatttactcagaaaggtaacctcctccgccacattaaactg

SEQ ID NO: 945 - DNA, 66 bp, Synthetic construct
  source 1..66: mol_type = other DNA
ttcgcatgtccagtatgtggggcatgttttactcagaaaggtaacctcctccgccacattaaactg

SEQ ID NO: 946 - DNA, 66 bp, Synthetic construct
  source 1..66: mol_type = other DNA
ttctggtgtgaggtctgtggggcagcctttactcagaaaggtaacctcctccgccacattaaactg

SEQ ID NO: 947 - DNA, 66 bp, Synthetic construct
  source 1..66: mol_type = other DNA
ctctattgtgagatctgtggatttatgtgtactcagaaaggtaacctcctccgccacattaaactg

SEQ ID NO: 948 - DNA, 66 bp, Synthetic construct; identical to SEQ ID NO: 32
  source 1..66: mol_type = other DNA

SEQ ID NO: 949 - DNA, 66 bp, Synthetic construct
  source 1..66: mol_type = other DNA
ttctattgtgagatctgtggggcattttttactcagaaaggtaacctcctccgccacattaaactg

SEQ ID NO: 950 - DNA, 66 bp, Synthetic construct; identical to SEQ ID NO: 676
  source 1..66: mol_type = other DNA

SEQ ID NO: 951 - DNA, 66 bp, Synthetic construct
  source 1..66: mol_type = other DNA
ttctactgtgacatatgtggggcagcctttactcagaaaggtaacctcctccgccacattaaactg

SEQ ID NO: 952 - DNA, 66 bp, Synthetic construct
  source 1..66: mol_type = other DNA
ttcggctgtgaagtttgtggggcaagttttactcagaaaggtaacctcctccgccacattaaactg

SEQ ID NO: 953 - DNA, 66 bp, Synthetic construct
  source 1..66: mol_type = other DNA
ctgttttgtgaaatttgtggattttgttgtactcagaaaggtaacctcctccgccacattaaactg

SEQ ID NO: 954 - DNA, 66 bp, Synthetic construct; identical to SEQ ID NO: 734
  source 1..66: mol_type = other DNA

SEQ ID NO: 955 - DNA, 66 bp, Synthetic construct
  source 1..66: mol_type = other DNA
ttctggtgtgaggtttgtggggcacgctttactcagaaaggtaacctcctccgccacattaaactg

SEQ ID NO: 956 - DNA, 66 bp, Synthetic construct
  source 1..66: mol_type = other DNA
ttcttctgtgaggtctgtggggcacagtttactcagaaaggtaacctcctccgccacattaaactg

SEQ ID NO: 957 - DNA, 66 bp, Synthetic construct; identical to SEQ ID NO: 247
  source 1..66: mol_type = other DNA

SEQ ID NO: 958 - DNA, 66 bp, Synthetic construct; identical to SEQ ID NO: 456
  source 1..66: mol_type = other DNA

SEQ ID NO: 959 - DNA, 66 bp, Synthetic construct; identical to SEQ ID NO: 341
  source 1..66: mol_type = other DNA

SEQ ID NO: 960 - DNA, 66 bp, Synthetic construct; identical to SEQ ID NO: 748
  source 1..66: mol_type = other DNA

SEQ ID NO: 961 - DNA, 66 bp, Synthetic construct; identical to SEQ ID NO: 548
  source 1..66: mol_type = other DNA

SEQ ID NO: 962 - DNA, 66 bp, Synthetic construct
  source 1..66: mol_type = other DNA
ttcttctgtcctgtgtgtggggcacgatttactcagaaaggtaacctcctccgccacattaaactg

SEQ ID NO: 963 - DNA, 66 bp, Synthetic construct
  source 1..66: mol_type = other DNA
ttgtactgtgagatctgcggattctgttgtactcagaaaggtaacctcctccgccacattaaactg

SEQ ID NO: 964 - DNA, 66 bp, Synthetic construct
  source 1..66: mol_type = other DNA
ttcttttgtgatatctgtggggcaaagtttactcagaaaggtaacctcctccgccacattaaactg

SEQ ID NO: 965 - DNA, 66 bp, Synthetic construct
  source 1..66: mol_type = other DNA
ttctgttgtgaggtctgtggggcaggctttactcagaaaggtaacctcctccgccacattaaactg

SEQ ID NO: 966 - DNA, 66 bp, Synthetic construct
  source 1..66: mol_type = other DNA
ttcttttgtgagatctgtggggcaatgtttactcagaaaggtaacctcctccgccacattaaactg

SEQ ID NO: 967 - DNA, 66 bp, Synthetic construct
  source 1..66: mol_type = other DNA
ttcttttgtgagatctgtggggcacactttactcagaaaggtaacctcctccgccacattaaactg

SEQ ID NO: 968 - DNA, 66 bp, Synthetic construct
  source 1..66: mol_type = other DNA
ttcgggtgtccagtgtgtggggcaccctttactcagaaaggtaacctcctccgccacattaaactg

SEQ ID NO: 969 - DNA, 66 bp, Synthetic construct; identical to SEQ ID NO: 627
  source 1..66: mol_type = other DNA

SEQ ID NO: 970 - DNA, 66 bp, Synthetic construct
  source 1..66: mol_type = other DNA
ttcgcctgtgaaatctgtggggcaacatttactcagaaaggtaacctcctccgccacattaaactg

SEQ ID NO: 971 - DNA, 66 bp, Synthetic construct
  source 1..66: mol_type = other DNA
ttctggtgtgaaatttgtggggcagtatttactcagaaaggtaacctcctccgccacattaaactg

SEQ ID NO: 972 - DNA, 66 bp, Synthetic construct
  source 1..66: mol_type = other DNA
ttctggtgtgagatatgtggggcaatgtttactcagaaaggtaacctcctccgccacattaaactg

SEQ ID NO: 973 - DNA, 66 bp, Synthetic construct
  source 1..66: mol_type = other DNA
ttcagctgtcccgtttgtggggcatcctttactcagaaaggtaacctcctccgccacattaaactg

SEQ ID NO: 974 - DNA, 66 bp, Synthetic construct; identical to SEQ ID NO: 451
  source 1..66: mol_type = other DNA

SEQ ID NO: 975 - DNA, 66 bp, Synthetic construct
  source 1..66: mol_type = other DNA
ttctggtgtgaggtttgtggggcaaactttactcagaaaggtaacctcctccgccacattaaactg

SEQ ID NO: 976 - DNA, 66 bp, Synthetic construct
  source 1..66: mol_type = other DNA
ttcggctgtcccatttgtggggcaatgtttactcagaaaggtaacctcctccgccacattaaactg

SEQ ID NO: 977 - DNA, 66 bp, Synthetic construct
  source 1..66: mol_type = other DNA
ttcgcctgtcccatctgtggggcacaatttactcagaaaggtaacctcctccgccacattaaactg

SEQ ID NO: 978 - DNA, 66 bp, Synthetic construct
  source 1..66: mol_type = other DNA
ttctactgtgacatttgtggggcatgttttactcagaaaggtaacctcctccgccacattaaactg

SEQ ID NO: 979 - DNA, 66 bp, Synthetic construct
  source 1..66: mol_type = other DNA
ttcgcatgtgaggtttgtggggcaacctttactcagaaaggtaacctcctccgccacattaaactg

SEQ ID NO: 980 - DNA, 66 bp, Synthetic construct
  source 1..66: mol_type = other DNA
ttcggttgtccggtctgtggggcagcctttactcagaaaggtaacctcctccgccacattaaactg

SEQ ID NO: 981 - DNA, 66 bp, Synthetic construct
  source 1..66: mol_type = other DNA
ttcggatgtgaggtttgtggggcaatgtttactcagaaaggtaacctcctccgccacattaaactg

SEQ ID NO: 982 - DNA, 66 bp, Synthetic construct
  source 1..66: mol_type = other DNA
ttctattgtgaagtttgtggggcaatgtttactcagaaaggtaacctcctccgccacattaaactg

SEQ ID NO: 983 - DNA, 66 bp, Synthetic construct
  source 1..66: mol_type = other DNA
ttcgcctgtgaaatttgtggggcacactttactcagaaaggtaacctcctccgccacattaaactg

SEQ ID NO: 984 - DNA, 66 bp, Synthetic construct; identical to SEQ ID NO: 536
  source 1..66: mol_type = other DNA

SEQ ID NO: 985 - DNA, 66 bp, Synthetic construct; identical to SEQ ID NO: 613
  source 1..66: mol_type = other DNA

SEQ ID NO: 986 - DNA, 66 bp, Synthetic construct
  source 1..66: mol_type = other DNA
ttctggtgtgatatctgtggggcatgctttactcagaaaggtaacctcctccgccacattaaactg

SEQ ID NO: 987 - DNA, 66 bp, Synthetic construct
  source 1..66: mol_type = other DNA
ttgtactgtcccatctgtggtttcggttgcactcagaaaggtaacctcctccgccacattaaactg

SEQ ID NO: 988 - DNA, 66 bp, Synthetic construct
  source 1..66: mol_type = other DNA
ttctactgtgaggtgtgtggggcaggatttactcagaaaggtaacctcctccgccacattaaactg

SEQ ID NO: 989 - DNA, 66 bp, Synthetic construct
  source 1..66: mol_type = other DNA
ttctattgtgatatctgtggggcaagatttactcagaaaggtaacctcctccgccacattaaactg

SEQ ID NO: 990 - DNA, 66 bp, Synthetic construct; identical to SEQ ID NO: 555
  source 1..66: mol_type = other DNA

SEQ ID NO: 991 - DNA, 66 bp, Synthetic construct
  source 1..66: mol_type = other DNA
ttctggtgtcccgtatgtggggcatcttttactcagaaaggtaacctcctccgccacattaaactg

SEQ ID NO: 992 - DNA, 66 bp, Synthetic construct
  source 1..66: mol_type = other DNA
ttcagctgtgaaatctgtggggcatgctttactcagaaaggtaacctcctccgccacattaaactg

SEQ ID NO: 993 - DNA, 66 bp, Synthetic construct
  source 1..66: mol_type = other DNA
ttcttttgtgatatctgtggggcatgttttactcagaaaggtaacctcctccgccacattaaactg

SEQ ID NO: 994 - DNA, 66 bp, Synthetic construct; identical to SEQ ID NO: 600
  source 1..66: mol_type = other DNA

SEQ ID NO: 995 - DNA, 66 bp, Synthetic construct
  source 1..66: mol_type = other DNA
ctgtactgcgaaatttgcggctttgtgtgtactcagaaaggtaacctcctccgccacattaaactg

SEQ ID NO: 996 - DNA, 66 bp, Synthetic construct
  source 1..66: mol_type = other DNA
ttctggtgtccaatctgtggggcaggttttactcagaaaggtaacctcctccgccacattaaactg

SEQ ID NO: 997 - DNA, 66 bp, Synthetic construct
  source 1..66: mol_type = other DNA
ttcgcctgtgagatttgtggggcaatgtttactcagaaaggtaacctcctccgccacattaaactg

SEQ ID NO: 998 - DNA, 66 bp, Synthetic construct
  source 1..66: mol_type = other DNA
ttcgcgtgtgagatctgtggggcagtgtttactcagaaaggtaacctcctccgccacattaaactg

SEQ ID NO: 999 - DNA, 66 bp, Synthetic construct
  source 1..66: mol_type = other DNA
ctgtggtgcgaaatctgcggattcaagtgtactcagaaaggtaacctcctccgccacattaaactg

SEQ ID NO: 1000 - DNA, 66 bp, Synthetic construct; identical to SEQ ID NO: 74
  source 1..66: mol_type = other DNA

SEQ ID NO: 1001 - DNA, 66 bp, Synthetic construct
  source 1..66: mol_type = other DNA
ttctggtgtccgatctgtggggcaagttttactcagaaaggtaacctcctccgccacattaaactg

SEQ ID NO: 1002 - DNA, 66 bp, Synthetic construct
  source 1..66: mol_type = other DNA
ctatactgcccgatatgcgggtttgtctgtactcagaaaggtaacctcctccgccacattaaactg

SEQ ID NO: 1003 - DNA, 66 bp, Synthetic construct
  source 1..66: mol_type = other DNA
ttctactgtgaaatctgtggggcactgtttactcagaaaggtaacctcctccgccacattaaactg

SEQ ID NO: 1004 - DNA, 66 bp, Synthetic construct; identical to SEQ ID NO: 410
  source 1..66: mol_type = other DNA

SEQ ID NO: 1005 - DNA, 66 bp, Synthetic construct
  source 1..66: mol_type = other DNA
ttctggtgtcccatctgtggggcaccgtttactcagaaaggtaacctcctccgccacattaaactg

SEQ ID NO: 1006 - DNA, 66 bp, Synthetic construct
  source 1..66: mol_type = other DNA
ttcgggtgtccaatctgtggggcaggctttactcagaaaggtaacctcctccgccacattaaactg

SEQ ID NO: 1007 - DNA, 66 bp, Synthetic construct
  source 1..66: mol_type = other DNA
ttcgactgtgaaatctgtggggcacattttactcagaaaggtaacctcctccgccacattaaactg

SEQ ID NO: 1008 - DNA, 66 bp, Synthetic construct
  source 1..66: mol_type = other DNA
ttctggtgtgatatctgtggggcaagttttactcagaaaggtaacctcctccgccacattaaactg

SEQ ID NO: 1009 - DNA, 66 bp, Synthetic construct
  source 1..66: mol_type = other DNA
ctgttctgcgagatttgcggatttgtctgcactcagaaaggtaacctcctccgccacattaaactg

SEQ ID NO: 1010 - DNA, 66 bp, Synthetic construct
  source 1..66: mol_type = other DNA
ttcttttgtgaaatttgtggggcaacttttactcagaaaggtaacctcctccgccacattaaactg

SEQ ID NO: 1011 - DNA, 66 bp, Synthetic construct
  source 1..66: mol_type = other DNA
ttcggctgtcccatctgtggggcatcatttactcagaaaggtaacctcctccgccacattaaactg

SEQ ID NO: 1012 - DNA, 66 bp, Synthetic construct
  source 1..66: mol_type = other DNA
ttaggctgtccgatttgtggcttcttttgcactcagaaaggtaacctcctccgccacattaaactg

SEQ ID NO: 1013 - DNA, 66 bp, Synthetic construct
  source 1..66: mol_type = other DNA
ttcagctgtgaagtctgtggggcatgctttactcagaaaggtaacctcctccgccacattaaactg

SEQ ID NO: 1014 - DNA, 66 bp, Synthetic construct
  source 1..66: mol_type = other DNA
ttctactgtccaatatgtggggcatactttactcagaaaggtaacctcctccgccacattaaactg

SEQ ID NO: 1015 - DNA, 66 bp, Synthetic construct
  source 1..66: mol_type = other DNA
ttctattgtgaggtatgtggggcaaactttactcagaaaggtaacctcctccgccacattaaactg

SEQ ID NO: 1016 - DNA, 66 bp, Synthetic construct
  source 1..66: mol_type = other DNA
ttcttctgtcccatctgtggggcatcctttactcagaaaggtaacctcctccgccacattaaactg

SEQ ID NO: 1017 - DNA, 66 bp, Synthetic construct; identical to SEQ ID NO: 33
  source 1..66: mol_type = other DNA

SEQ ID NO: 1018 - DNA, 66 bp, Synthetic construct
  source 1..66: mol_type = other DNA
ttcgggtgtcctgtttgtggggcaggctttactcagaaaggtaacctcctccgccacattaaactg

SEQ ID NO: 1019 - DNA, 66 bp, Synthetic construct
  source 1..66: mol_type = other DNA
ttctactgtccggtttgtggggcatgctttactcagaaaggtaacctcctccgccacattaaactg

SEQ ID NO: 1020 - DNA, 66 bp, Synthetic construct; identical to SEQ ID NO: 202
  source 1..66: mol_type = other DNA

SEQ ID NO: 1021 - DNA, 66 bp, Synthetic construct
  source 1..66: mol_type = other DNA
ttcgcatgtgaggtgtgtggggcaatgtttactcagaaaggtaacctcctccgccacattaaactg

SEQ ID NO: 1022 - DNA, 66 bp, Synthetic construct
  source 1..66: mol_type = other DNA
ttctactgtgagatctgtggggcatactttactcagaaaggtaacctcctccgccacattaaactg

SEQ ID NO: 1023 - DNA, 66 bp, Synthetic construct; identical to SEQ ID NO: 679
  source 1..66: mol_type = other DNA

SEQ ID NO: 1024 - DNA, 66 bp, Synthetic construct
  source 1..66: mol_type = other DNA
ttctactgtccgatctgtggggcaagttttactcagaaaggtaacctcctccgccacattaaactg

SEQ ID NO: 1025 - DNA, 66 bp, Synthetic construct
  source 1..66: mol_type = other DNA
ttcgcctgtgaggtgtgtggggcagtctttactcagaaaggtaacctcctccgccacattaaactg

SEQ ID NO: 1026 - DNA, 66 bp, Synthetic construct
  source 1..66: mol_type = other DNA
ctgttttgccctatttgtggattccgctgcactcagaaaggtaacctcctccgccacattaaactg

SEQ ID NO: 1027 - DNA, 66 bp, Synthetic construct; identical to SEQ ID NO: 692
  source 1..66: mol_type = other DNA

SEQ ID NO: 1028 - DNA, 66 bp, Synthetic construct
  source 1..66: mol_type = other DNA
ttctggtgtgaaatttgtggggcatactttactcagaaaggtaacctcctccgccacattaaactg

SEQ ID NO: 1029 - DNA, 66 bp, Synthetic construct
  source 1..66: mol_type = other DNA
ttccactgtgaaatatgtggggcagcgtttactcagaaaggtaacctcctccgccacattaaactg

SEQ ID NO: 1030 - DNA, 66 bp, Synthetic construct
  source 1..66: mol_type = other DNA
ttcttctgtgacatctgtggggcaagttttactcagaaaggtaacctcctccgccacattaaactg

SEQ ID NO: 1031 - DNA, 66 bp, Synthetic construct
  source 1..66: mol_type = other DNA
ttctcctgtgaaatctgtggggcaaaatttactcagaaaggtaacctcctccgccacattaaactg

SEQ ID NO: 1032 - DNA, 66 bp, Synthetic construct
  source 1..66: mol_type = other DNA
ttctggtgtcctgtgtgtggggcaccatttactcagaaaggtaacctcctccgccacattaaactg

SEQ ID NO: 1033 - DNA, 66 bp, Synthetic construct
  source 1..66: mol_type = other DNA
ttcgcttgtcccgtctgtggggcaacatttactcagaaaggtaacctcctccgccacattaaactg

SEQ ID NO: 1034 - DNA, 66 bp, Synthetic construct; identical to SEQ ID NO: 364
  source 1..66: mol_type = other DNA

SEQ ID NO: 1035 - DNA, 66 bp, Synthetic construct
  source 1..66: mol_type = other DNA
ttcagttgtcccgtctgtggggcagcctttactcagaaaggtaacctcctccgccacattaaactg

SEQ ID NO: 1036 - DNA, 66 bp, Synthetic construct
  source 1..66: mol_type = other DNA
ttctgttgtgaggtttgtggggcaccctttactcagaaaggtaacctcctccgccacattaaactg

SEQ ID NO: 1037 - DNA, 66 bp, Synthetic construct
  source 1..66: mol_type = other DNA
ttcggatgtgagatctgtggggcaacgtttactcagaaaggtaacctcctccgccacattaaactg

SEQ ID NO: 1038 - DNA, 66 bp, Synthetic construct
  source 1..66: mol_type = other DNA
ttctggtgtgaagtgtgtggggcaggatttactcagaaaggtaacctcctccgccacattaaactg

SEQ ID NO: 1039 - DNA, 66 bp, Synthetic construct
  source 1..66: mol_type = other DNA
ttctcttgtgaagtgtgtggggcaggatttactcagaaaggtaacctcctccgccacattaaactg

SEQ ID NO: 1040 - DNA, 66 bp, Synthetic construct
  source 1..66: mol_type = other DNA
ttattttgcgagatttgtgggtttaaatgcactcagaaaggtaacctcctccgccacattaaactg

SEQ ID NO: 1041 - DNA, 66 bp, Synthetic construct
  source 1..66: mol_type = other DNA
ttcttttgtccgatttgtggggcatgctttactcagaaaggtaacctcctccgccacattaaactg

SEQ ID NO: 1042 - DNA, 66 bp, Synthetic construct
  source 1..66: mol_type = other DNA
ttctggtgtgatatttgtggggcaaagtttactcagaaaggtaacctcctccgccacattaaactg

SEQ ID NO: 1043 - DNA, 66 bp, Synthetic construct
  source 1..66: mol_type = other DNA
ctctattgtccaatctgcggtttttattgcactcagaaaggtaacctcctccgccacattaaactg

SEQ ID NO: 1044 - DNA, 66 bp, Synthetic construct
  source 1..66: mol_type = other DNA
ttcaattgtgaggtgtgtggggcaagctttactcagaaaggtaacctcctccgccacattaaactg

SEQ ID NO: 1045 - DNA, 66 bp, Synthetic construct
  source 1..66: mol_type = other DNA
ttctactgtgacgtgtgtggggcacgttttactcagaaaggtaacctcctccgccacattaaactg

SEQ ID NO: 1046 - DNA, 66 bp, Synthetic construct
  source 1..66: mol_type = other DNA
ctgtggtgtccgatctgcggctttcaatgcactcagaaaggtaacctcctccgccacattaaactg

SEQ ID NO: 1047 - DNA, 66 bp, Synthetic construct
  source 1..66: mol_type = other DNA
ttctactgtgatatttgtggggcaaagtttactcagaaaggtaacctcctccgccacattaaactg

SEQ ID NO: 1048 - DNA, 66 bp, Synthetic construct
  source 1..66: mol_type = other DNA
ttctattgtccaatctgtggggcaacatttactcagaaaggtaacctcctccgccacattaaactg

SEQ ID NO: 1049 - DNA, 66 bp, Synthetic construct
  source 1..66: mol_type = other DNA
ttattctgtgagatctgtggatttatgtgcactcagaaaggtaacctcctccgccacattaaactg

SEQ ID NO: 1050 - DNA, 66 bp, Synthetic construct
  source 1..66: mol_type = other DNA
ttccattgtccagtgtgtggggcaccctttactcagaaaggtaacctcctccgccacattaaactg

SEQ ID NO: 1051 - DNA, 66 bp, Synthetic construct
  source 1..66: mol_type = other DNA
ttctactgtcctatctgtggggcacagtttactcagaaaggtaacctcctccgccacattaaactg

SEQ ID NO: 1052 - DNA, 66 bp, Synthetic construct
  source 1..66: mol_type = other DNA
ctggggtgcccaatctgtggcttttggtgcactcagaaaggtaacctcctccgccacattaaactg

SEQ ID NO: 1053 - DNA, 66 bp, Synthetic construct
  source 1..66: mol_type = other DNA
tttgggtgcccaatctgtggtcgaatgttcactcagaaaggtaacctcctccgccacattaaactg

SEQ ID NO: 1054 - DNA, 66 bp, Synthetic construct
  source 1..66: mol_type = other DNA
ctgtggtgtgagatttgtggcttccagtgcactcagaaaggtaacctcctccgccacattaaactg

SEQ ID NO: 1055 - DNA, 66 bp, Synthetic construct; identical to SEQ ID NO: 642
  source 1..66: mol_type = other DNA

SEQ ID NO: 1056 - DNA, 66 bp, Synthetic construct; identical to SEQ ID NO: 495
  source 1..66: mol_type = other DNA

SEQ ID NO: 1057 - DNA, 66 bp, Synthetic construct
  source 1..66: mol_type = other DNA
ttcgcttgtgaagtctgtggggcaccctttactcagaaaggtaacctcctccgccacattaaactg

SEQ ID NO: 1058 - DNA, 66 bp, Synthetic construct
  source 1..66: mol_type = other DNA
ttcttctgtgaaatatgtggggcagagtttactcagaaaggtaacctcctccgccacattaaactg

SEQ ID NO: 1059 - DNA, 66 bp, Synthetic construct
  source 1..66: mol_type = other DNA
ttctactgtgatatttgtggggcaagctttactcagaaaggtaacctcctccgccacattaaactg

SEQ ID NO: 1060 - DNA, 66 bp, Synthetic construct
  source 1..66: mol_type = other DNA
ttctattgtcccatttgtggggcaaactttactcagaaaggtaacctcctccgccacattaaactg

SEQ ID NO: 1061 - DNA, 66 bp, Synthetic construct
  source 1..66: mol_type = other DNA
ttctattgtgatatctgtggggcagggtttactcagaaaggtaacctcctccgccacattaaactg

SEQ ID NO: 1062 - DNA, 66 bp, Synthetic construct
  source 1..66: mol_type = other DNA
ttcggttgtgaggtttgtggggcacagtttactcagaaaggtaacctcctccgccacattaaactg

SEQ ID NO: 1063 - DNA, 66 bp, Synthetic construct
  source 1..66: mol_type = other DNA
ttccattgtgaggtctgtggggcaggctttactcagaaaggtaacctcctccgccacattaaactg

SEQ ID NO: 1064 - DNA, 66 bp, Synthetic construct
  source 1..66: mol_type = other DNA
ttctattgtgaagtgtgtggggcactgtttactcagaaaggtaacctcctccgccacattaaactg

SEQ ID NO: 1065 - DNA, 66 bp, Synthetic construct; identical to SEQ ID NO: 597
  source 1..66: mol_type = other DNA

SEQ ID NO: 1066 - DNA, 66 bp, Synthetic construct
  source 1..66: mol_type = other DNA
ttcttctgtgaaatttgtggggcactgtttactcagaaaggtaacctcctccgccacattaaactg

SEQ ID NO: 1067 - DNA, 66 bp, Synthetic construct
  source 1..66: mol_type = other DNA
ttcgattgtgagatttgtggggcatcctttactcagaaaggtaacctcctccgccacattaaactg

SEQ ID NO: 1068 - DNA, 66 bp, Synthetic construct
  source 1..66: mol_type = other DNA
ttctactgtgacatttgtggggcacagtttactcagaaaggtaacctcctccgccacattaaactg

SEQ ID NO: 1069 - DNA, 66 bp, Synthetic construct
  source 1..66: mol_type = other DNA
ttgttttgtgagatctgtggttttgcgtgcactcagaaaggtaacctcctccgccacattaaactg

SEQ ID NO: 1070 - DNA, 66 bp, Synthetic construct
  source 1..66: mol_type = other DNA
ttccattgtgacatctgtggggcaccgtttactcagaaaggtaacctcctccgccacattaaactg

SEQ ID NO: 1071 - DNA, 66 bp, Synthetic construct
  source 1..66: mol_type = other DNA
ctgggctgccccatctgcggtttccgttgcactcagaaaggtaacctcctccgccacattaaactg

SEQ ID NO: 1072 - DNA, 66 bp, Synthetic construct
  source 1..66: mol_type = other DNA
ttcgcatgtgagatctgtggggcatactttactcagaaaggtaacctcctccgccacattaaactg

SEQ ID NO: 1073 - DNA, 66 bp, Synthetic construct
  source 1..66: mol_type = other DNA
ctgtactgtgagatttgcggattcgcttgtactcagaaaggtaacctcctccgccacattaaactg

SEQ ID NO: 1074 - DNA, 66 bp, Synthetic construct
  source 1..66: mol_type = other DNA
ctgggctgccccatctgcggtttctgctgcactcagaaaggtaacctcctccgccacattaaactg

SEQ ID NO: 1075 - DNA, 66 bp, Synthetic construct
  source 1..66: mol_type = other DNA
ttcggctgtcctatctgtggggcattttttactcagaaaggtaacctcctccgccacattaaactg

SEQ ID NO: 1076 - DNA, 66 bp, Synthetic construct; identical to SEQ ID NO: 73
  source 1..66: mol_type = other DNA

SEQ ID NO: 1077 - DNA, 66 bp, Synthetic construct
  source 1..66: mol_type = other DNA
ttctggtgtgagatttgtggggcaatatttactcagaaaggtaacctcctccgccacattaaactg

SEQ ID NO: 1078 - DNA, 66 bp, Synthetic construct
  source 1..66: mol_type = other DNA
ttcgcctgtgaggtgtgtggggcacactttactcagaaaggtaacctcctccgccacattaaactg

SEQ ID NO: 1079 - DNA, 66 bp, Synthetic construct
  source 1..66: mol_type = other DNA
ctggcttgcgagatatgcggttttcagtgtactcagaaaggtaacctcctccgccacattaaactg

SEQ ID NO: 1080 - DNA, 66 bp, Synthetic construct
  source 1..66: mol_type = other DNA
ttctactgtccgatttgtggggcagaatttactcagaaaggtaacctcctccgccacattaaactg

SEQ ID NO: 1081 - DNA, 66 bp, Synthetic construct; identical to SEQ ID NO: 220
  source 1..66: mol_type = other DNA

SEQ ID NO: 1082 - DNA, 66 bp, Synthetic construct; identical to SEQ ID NO: 646
  source 1..66: mol_type = other DNA

SEQ ID NO: 1083 - DNA, 66 bp, Synthetic construct
  source 1..66: mol_type = other DNA
ttcggctgtgagatttgtggggcaagatttactcagaaaggtaacctcctccgccacattaaactg

SEQ ID NO: 1084 - DNA, 66 bp, Synthetic construct
  source 1..66: mol_type = other DNA
ttctggtgtgatatctgtggggcacgctttactcagaaaggtaacctcctccgccacattaaactg

SEQ ID NO: 1085 - DNA, 66 bp, Synthetic construct
  source 1..66: mol_type = other DNA
ttcaactgtgaggtatgtggggcaggttttactcagaaaggtaacctcctccgccacattaaactg

SEQ ID NO: 1086 - DNA, 66 bp, Synthetic construct
  source 1..66: mol_type = other DNA
ttcttctgtcctgtatgtggggcaggttttactcagaaaggtaacctcctccgccacattaaactg

SEQ ID NO: 1087 - DNA, 66 bp, Synthetic construct
  source 1..66: mol_type = other DNA
ttcttctgtccaatttgtggggcagcctttactcagaaaggtaacctcctccgccacattaaactg

SEQ ID NO: 1088 - DNA, 66 bp, Synthetic construct
  source 1..66: mol_type = other DNA
tttggatgtcccatttgcgggagactgttcactcagaaaggtaacctcctccgccacattaaactg

SEQ ID NO: 1089 - DNA, 66 bp, Synthetic construct
  source 1..66: mol_type = other DNA
ttctgctgtcctatttgtggggcaggctttactcagaaaggtaacctcctccgccacattaaactg

SEQ ID NO: 1090 - DNA, 66 bp, Synthetic construct
  source 1..66: mol_type = other DNA
ttatattgtcctatctgtggattcatgtgcactcagaaaggtaacctcctccgccacattaaactg

SEQ ID NO: 1091 - DNA, 66 bp, Synthetic construct
  source 1..66: mol_type = other DNA
ttcttttgtgaagtgtgtggggcaatgtttactcagaaaggtaacctcctccgccacattaaactg

SEQ ID NO: 1092 - DNA, 66 bp, Synthetic construct
  source 1..66: mol_type = other DNA
ttctggtgtgaagtgtgtggggcaatgtttactcagaaaggtaacctcctccgccacattaaactg

SEQ ID NO: 1093 - DNA, 66 bp, Synthetic construct
  source 1..66: mol_type = other DNA
ttcggatgtcctgtctgtggggcactgtttactcagaaaggtaacctcctccgccacattaaactg

SEQ ID NO: 1094 - DNA, 66 bp, Synthetic construct
  source 1..66: mol_type = other DNA
ctgtactgcgagatctgtggcttccattgtactcagaaaggtaacctcctccgccacattaaactg

SEQ ID NO: 1095 - DNA, 66 bp, Synthetic construct; identical to SEQ ID NO: 425
  source 1..66: mol_type = other DNA

SEQ ID NO: 1096 - DNA, 66 bp, Synthetic construct
  source 1..66: mol_type = other DNA
ttccactgtgagatttgtggggcatcttttactcagaaaggtaacctcctccgccacattaaactg

SEQ ID NO: 1097 - DNA, 66 bp, Synthetic construct; identical to SEQ ID NO: 689
  source 1..66: mol_type = other DNA

SEQ ID NO: 1098 - DNA, 66 bp, Synthetic construct
  source 1..66: mol_type = other DNA
ctctactgtcccatctgtggcttccactgcactcagaaaggtaacctcctccgccacattaaactg

SEQ ID NO: 1099 - DNA, 66 bp, Synthetic construct
  source 1..66: mol_type = other DNA
ttctggtgtccagtgtgtggggcagcatttactcagaaaggtaacctcctccgccacattaaactg

SEQ ID NO: 1100 - DNA, 66 bp, Synthetic construct
  source 1..66: mol_type = other DNA
ttcttttgtccaatctgtggggcacgctttactcagaaaggtaacctcctccgccacattaaactg

SEQ ID NO: 1101 - DNA, 66 bp, Synthetic construct
  source 1..66: mol_type = other DNA
ttccactgtcctatttgtggggcaggatttactcagaaaggtaacctcctccgccacattaaactg

SEQ ID NO: 1102 - DNA, 66 bp, Synthetic construct
  source 1..66: mol_type = other DNA
ttctactgtccgatctgtggggcacattttactcagaaaggtaacctcctccgccacattaaactg

SEQ ID NO: 1103 - DNA, 66 bp, Synthetic construct
  source 1..66: mol_type = other DNA
ttctggtgtcccatatgtggggcagcttttactcagaaaggtaacctcctccgccacattaaactg

SEQ ID NO: 1104 - DNA, 66 bp, Synthetic construct
  source 1..66: mol_type = other DNA
ttctggtgtgatatctgtggggcagcctttactcagaaaggtaacctcctccgccacattaaactg

SEQ ID NO: 1105 - DNA, 66 bp, Synthetic construct; identical to SEQ ID NO: 683
  source 1..66: mol_type = other DNA

SEQ ID NO: 1106 - DNA, 66 bp, Synthetic construct; identical to SEQ ID NO: 367
  source 1..66: mol_type = other DNA

SEQ ID NO: 1107 - DNA, 66 bp, Synthetic construct
  source 1..66: mol_type = other DNA
ttctactgtgaggtgtgtggggcacattttactcagaaaggtaacctcctccgccacattaaactg

SEQ ID NO: 1108 - DNA, 66 bp, Synthetic construct
  source 1..66: mol_type = other DNA
ttcgcctgtgatatctgtggggcaaagtttactcagaaaggtaacctcctccgccacattaaactg

SEQ ID NO: 1109 - DNA, 66 bp, Synthetic construct; identical to SEQ ID NO: 5
  source 1..66: mol_type = other DNA

SEQ ID NO: 1110 - DNA, 66 bp, Synthetic construct
  source 1..66: mol_type = other DNA
ttcttctgtccagtgtgtggggcacagtttactcagaaaggtaacctcctccgccacattaaactg

SEQ ID NO: 1111 - DNA, 66 bp, Synthetic construct
  source 1..66: mol_type = other DNA
ttctactgtgaggtttgtggggcaacgtttactcagaaaggtaacctcctccgccacattaaactg

SEQ ID NO: 1112 - DNA, 66 bp, Synthetic construct
  source 1..66: mol_type = other DNA
ttctggtgtgaggtgtgtggggcacattttactcagaaaggtaacctcctccgccacattaaactg

SEQ ID NO: 1113 - DNA, 66 bp, Synthetic construct
  source 1..66: mol_type = other DNA
ttggcctgtccgatatgtggttttcattgcactcagaaaggtaacctcctccgccacattaaactg

SEQ ID NO: 1114 - DNA, 66 bp, Synthetic construct
  source 1..66: mol_type = other DNA
ctggggtgcccaatctgcggctttgcatgtactcagaaaggtaacctcctccgccacattaaactg

SEQ ID NO: 1115 - DNA, 66 bp, Synthetic construct
  source 1..66: mol_type = other DNA
ttcgcctgtcctgtttgtggggcacagtttactcagaaaggtaacctcctccgccacattaaactg

SEQ ID NO: 1116 - DNA, 66 bp, Synthetic construct
  source 1..66: mol_type = other DNA
cttgcctgcgagatatgcggctttgcctgtactcagaaaggtaacctcctccgccacattaaactg

SEQ ID NO: 1117 - DNA, 66 bp, Synthetic construct; identical to SEQ ID NO: 704
  source 1..66: mol_type = other DNA

SEQ ID NO: 1118 - DNA, 66 bp, Synthetic construct
  source 1..66: mol_type = other DNA
ttcgcctgtcccgtctgtggggcagtgtttactcagaaaggtaacctcctccgccacattaaactg

SEQ ID NO: 1119 - DNA, 66 bp, Synthetic construct
  source 1..66: mol_type = other DNA
ttctactgtgatgtctgtggggcaccgtttactcagaaaggtaacctcctccgccacattaaactg

SEQ ID NO: 1120 - DNA, 66 bp, Synthetic construct
  source 1..66: mol_type = other DNA
ttcggttgtgaagtctgtggggcaacctttactcagaaaggtaacctcctccgccacattaaactg

SEQ ID NO: 1121 - DNA, 66 bp, Synthetic construct
  source 1..66: mol_type = other DNA
ttctactgtcccgtgtgtggggcaagctttactcagaaaggtaacctcctccgccacattaaactg

SEQ ID NO: 1122 - DNA, 66 bp, Synthetic construct
  source 1..66: mol_type = other DNA
ttcttttgtgaaatatgtggggcatattttactcagaaaggtaacctcctccgccacattaaactg

SEQ ID NO: 1123 - DNA, 66 bp, Synthetic construct
  source 1..66: mol_type = other DNA
ttctactgtccaatctgtggggcattttttactcagaaaggtaacctcctccgccacattaaactg

SEQ ID NO: 1124 - DNA, 66 bp, Synthetic construct
  source 1..66: mol_type = other DNA
ttcgcctgtcccatatgtggggcacactttactcagaaaggtaacctcctccgccacattaaactg

SEQ ID NO: 1125 - DNA, 66 bp, Synthetic construct
  source 1..66: mol_type = other DNA
ttcaattgtgaaatctgtggggcagcatttactcagaaaggtaacctcctccgccacattaaactg

SEQ ID NO: 1126 - DNA, 66 bp, Synthetic construct
  source 1..66: mol_type = other DNA
ttccattgtgaagtgtgtggggcagcctttactcagaaaggtaacctcctccgccacattaaactg

SEQ ID NO: 1127 - DNA, 66 bp, Synthetic construct
  source 1..66: mol_type = other DNA
ttctggtgtgaggtgtgtggggcaccctttactcagaaaggtaacctcctccgccacattaaactg

SEQ ID NO: 1128 - DNA, 66 bp, Synthetic construct
  source 1..66: mol_type = other DNA
ttctcatgtgaagtgtgtggggcaaagtttactcagaaaggtaacctcctccgccacattaaactg

SEQ ID NO: 1129 - DNA, 66 bp, Synthetic construct
  source 1..66: mol_type = other DNA
ctttattgtcccatctgtggatttcggtgtactcagaaaggtaacctcctccgccacattaaactg

SEQ ID NO: 1130 - DNA, 66 bp, Synthetic construct
  source 1..66: mol_type = other DNA
ttcttctgtgagatttgtggggcaaattttactcagaaaggtaacctcctccgccacattaaactg

SEQ ID NO: 1131 - DNA, 66 bp, Synthetic construct
  source 1..66: mol_type = other DNA
ttcggatgtgagatctgtggggcatcctttactcagaaaggtaacctcctccgccacattaaactg

SEQ ID NO: 1132 - DNA, 66 bp, Synthetic construct; identical to SEQ ID NO: 539
  source 1..66: mol_type = other DNA

SEQ ID NO: 1133 - DNA, 66 bp, Synthetic construct
  source 1..66: mol_type = other DNA
ttcttttgtcctatttgtggggcacagtttactcagaaaggtaacctcctccgccacattaaactg

SEQ ID NO: 1134 - DNA, 66 bp, Synthetic construct
  source 1..66: mol_type = other DNA
ttcaattgtgaagtgtgtggggcagcgtttactcagaaaggtaacctcctccgccacattaaactg

SEQ ID NO: 1135 - DNA, 66 bp, Synthetic construct
  source 1..66: mol_type = other DNA
ttcggatgccccatctgtgggcgaaaatttactcagaaaggtaacctcctccgccacattaaactg

SEQ ID NO: 1136 - DNA, 66 bp, Synthetic construct
  source 1..66: mol_type = other DNA
ctcttctgcccaatctgtggctttggatgtactcagaaaggtaacctcctccgccacattaaactg

SEQ ID NO: 1137 - DNA, 66 bp, Synthetic construct
  source 1..66: mol_type = other DNA
ttcgcctgtgatatttgtggggcaagttttactcagaaaggtaacctcctccgccacattaaactg

SEQ ID NO: 1138 - DNA, 66 bp, Synthetic construct
  source 1..66: mol_type = other DNA
ttcggatgtccaatttgtgggagggtgtttactcagaaaggtaacctcctccgccacattaaactg

SEQ ID NO: 1139 - DNA, 66 bp, Synthetic construct
  source 1..66: mol_type = other DNA
ttctggtgtcccgtctgtggggcaaattttactcagaaaggtaacctcctccgccacattaaactg

SEQ ID NO: 1140 - DNA, 66 bp, Synthetic construct
  source 1..66: mol_type = other DNA
ttctggtgtgaaatctgtggggcaacgtttactcagaaaggtaacctcctccgccacattaaactg

SEQ ID NO: 1141 - DNA, 66 bp, Synthetic construct
  source 1..66: mol_type = other DNA
ttccattgtccaatatgtggggcagcctttactcagaaaggtaacctcctccgccacattaaactg

SEQ ID NO: 1142 - DNA, 66 bp, Synthetic construct
  source 1..66: mol_type = other DNA
ctctggtgtgagatatgcgggtttatgtgcactcagaaaggtaacctcctccgccacattaaactg

SEQ ID NO: 1143 - DNA, 66 bp, Synthetic construct; identical to SEQ ID NO: 64
  source 1..66: mol_type = other DNA

SEQ ID NO: 1144 - DNA, 66 bp, Synthetic construct
  source 1..66: mol_type = other DNA
ctgtcctgcgaaatctgcggattcacatgcactcagaaaggtaacctcctccgccacattaaactg

SEQ ID NO: 1145 - DNA, 66 bp, Synthetic construct
  source 1..66: mol_type = other DNA
ctgttctgcccgatctgcggtttcgcctgcactcagaaaggtaacctcctccgccacattaaactg

SEQ ID NO: 1146 - DNA, 66 bp, Synthetic construct; identical to SEQ ID NO: 281
  source 1..66: mol_type = other DNA

SEQ ID NO: 1147 - DNA, 66 bp, Synthetic construct
  source 1..66: mol_type = other DNA
ttctactgtcccgtctgtggggcaggatttactcagaaaggtaacctcctccgccacattaaactg

SEQ ID NO: 1148 - DNA, 66 bp, Synthetic construct; identical to SEQ ID NO: 677
  source 1..66: mol_type = other DNA

SEQ ID NO: 1149 - DNA, 66 bp, Synthetic construct
  source 1..66: mol_type = other DNA
ttcaattgtaacatttgtggggcaccgtttactcagaaaggtaacctcctccgccacattaaactg

SEQ ID NO: 1150 - DNA, 66 bp, Synthetic construct
  source 1..66: mol_type = other DNA
ttcggctgtccagtttgtggggcagagtttactcagaaaggtaacctcctccgccacattaaactg

SEQ ID NO: 1151 - DNA, 66 bp, Synthetic construct
  source 1..66: mol_type = other DNA
ttcggatgtgagatctgtggggcagcgtttactcagaaaggtaacctcctccgccacattaaactg

SEQ ID NO: 1152 - DNA, 66 bp, Synthetic construct; identical to SEQ ID NO: 320
  source 1..66: mol_type = other DNA

SEQ ID NO: 1153 - DNA, 66 bp, Synthetic construct
  source 1..66: mol_type = other DNA
ttcgattgtcctatttgtggggcatcctttactcagaaaggtaacctcctccgccacattaaactg

SEQ ID NO: 1154 - DNA, 66 bp, Synthetic construct
  source 1..66: mol_type = other DNA
ttcgcctgtccaatctgtggggcaaattttactcagaaaggtaacctcctccgccacattaaactg

SEQ ID NO: 1155 - DNA, 66 bp, Synthetic construct
  source 1..66: mol_type = other DNA
cttgcttgcccaatttgcgggttttgttgcactcagaaaggtaacctcctccgccacattaaactg

SEQ ID NO: 1156 - DNA, 66 bp, Synthetic construct
  source 1..66: mol_type = other DNA
ttcttctgtcccgtttgtggggcatcctttactcagaaaggtaacctcctccgccacattaaactg

SEQ ID NO: 1157 - DNA, 66 bp, Synthetic construct
  source 1..66: mol_type = other DNA
ttttactgcgagatatgcggtcgccccttcactcagaaaggtaacctcctccgccacattaaactg

SEQ ID NO: 1158 - DNA, 66 bp, Synthetic construct
  source 1..66: mol_type = other DNA
ctaggctgcccaatctgtggtttcgtgtgcactcagaaaggtaacctcctccgccacattaaactg

SEQ ID NO: 1159 - DNA, 66 bp, Synthetic construct
  source 1..66: mol_type = other DNA
ttctggtgtgaaatttgtggggcattctttactcagaaaggtaacctcctccgccacattaaactg

SEQ ID NO: 1160 - DNA, 66 bp, Synthetic construct
  source 1..66: mol_type = other DNA
ttcttttgtcccatctgtggggcaggatttactcagaaaggtaacctcctccgccacattaaactg

SEQ ID NO: 1161 - DNA, 66 bp, Synthetic construct
  source 1..66: mol_type = other DNA
ttcttctgtccaatttgtggggcagagtttactcagaaaggtaacctcctccgccacattaaactg

SEQ ID NO: 1162 - DNA, 66 bp, Synthetic construct
  source 1..66: mol_type = other DNA
ctgttctgtccgatctgtggcttcgtatgtactcagaaaggtaacctcctccgccacattaaactg

SEQ ID NO: 1163 - DNA, 66 bp, Synthetic construct; identical to SEQ ID NO: 725
  source 1..66: mol_type = other DNA

SEQ ID NO: 1164 - DNA, 66 bp, Synthetic construct
  source 1..66: mol_type = other DNA
ttctggtgtccaatttgtggggcacagtttactcagaaaggtaacctcctccgccacattaaactg

SEQ ID NO: 1165 - DNA, 66 bp, Synthetic construct
  source 1..66: mol_type = other DNA
ttcggttgtccaatttgtggggcactgtttactcagaaaggtaacctcctccgccacattaaactg

SEQ ID NO: 1166 - DNA, 66 bp, Synthetic construct
  source 1..66: mol_type = other DNA
ttggggtgccctatatgcggctttatctgcactcagaaaggtaacctcctccgccacattaaactg

SEQ ID NO: 1167 - DNA, 66 bp, Synthetic construct
  source 1..66: mol_type = other DNA
ttcttctgtgaggtatgtggggcagagtttactcagaaaggtaacctcctccgccacattaaactg

SEQ ID NO: 1168 - DNA, 66 bp, Synthetic construct
  source 1..66: mol_type = other DNA
ttctgttgtaacatatgtggggcaccttttactcagaaaggtaacctcctccgccacattaaactg

SEQ ID NO: 1169 - DNA, 66 bp, Synthetic construct
  source 1..66: mol_type = other DNA
ttcgactgtcccatttgtggggcacattttactcagaaaggtaacctcctccgccacattaaactg

SEQ ID NO: 1170 - DNA, 66 bp, Synthetic construct
  source 1..66: mol_type = other DNA
ttcggatgtcccatttgtggcaggccctttactcagaaaggtaacctcctccgccacattaaactg

SEQ ID NO: 1171 - DNA, 66 bp, Synthetic construct
  source 1..66: mol_type = other DNA
ctgtactgcgaaatctgcgggtttttttgcactcagaaaggtaacctcctccgccacattaaactg

SEQ ID NO: 1172 - DNA, 66 bp, Synthetic construct
  source 1..66: mol_type = other DNA
ttcttctgtccagtatgtggggcatgctttactcagaaaggtaacctcctccgccacattaaactg

SEQ ID NO: 1173 - DNA, 66 bp, Synthetic construct
  source 1..66: mol_type = other DNA
ttcggatgtgagatctgtggggcaatgtttactcagaaaggtaacctcctccgccacattaaactg

SEQ ID NO: 1174 - DNA, 66 bp, Synthetic construct
  source 1..66: mol_type = other DNA
ttcggatgtcccgtctgtggggcatactttactcagaaaggtaacctcctccgccacattaaactg

SEQ ID NO: 1175 - DNA, 66 bp, Synthetic construct
  source 1..66: mol_type = other DNA
ttcgcctgtaacatctgtggggcaccctttactcagaaaggtaacctcctccgccacattaaactg

SEQ ID NO: 1176 - DNA, 66 bp, Synthetic construct
  source 1..66: mol_type = other DNA
ttctgctgtgaggtgtgtggggcacagtttactcagaaaggtaacctcctccgccacattaaactg

SEQ ID NO: 1177 - DNA, 66 bp, Synthetic construct
  source 1..66: mol_type = other DNA
ttctattgtccaatatgtggggcaggttttactcagaaaggtaacctcctccgccacattaaactg

SEQ ID NO: 1178 - DNA, 66 bp, Synthetic construct
  source 1..66: mol_type = other DNA
ttctactgtgaagtgtgtggggcatactttactcagaaaggtaacctcctccgccacattaaactg

SEQ ID NO: 1179 - DNA, 66 bp, Synthetic construct
  source 1..66: mol_type = other DNA
ttctggtgtcccatctgtggggcaaactttactcagaaaggtaacctcctccgccacattaaactg

SEQ ID NO: 1180 - DNA, 66 bp, Synthetic construct
  source 1..66: mol_type = other DNA
ttccactgtgagatttgtggggcaaagtttactcagaaaggtaacctcctccgccacattaaactg

SEQ ID NO: 1181 - DNA, 66 bp, Synthetic construct; identical to SEQ ID NO: 467
  source 1..66: mol_type = other DNA

SEQ ID NO: 1182 - DNA, 66 bp, Synthetic construct
  source 1..66: mol_type = other DNA
ttggcttgccccatttgtggtttcaagtgcactcagaaaggtaacctcctccgccacattaaactg

SEQ ID NO: 1183 - DNA, 66 bp, Synthetic construct; identical to SEQ ID NO: 170
  source 1..66: mol_type = other DNA

SEQ ID NO: 1184 - DNA, 66 bp, Synthetic construct
  source 1..66: mol_type = other DNA
ctctactgcgagatctgtgggttcatatgcactcagaaaggtaacctcctccgccacattaaactg

SEQ ID NO: 1185 - DNA, 66 bp, Synthetic construct
  source 1..66: mol_type = other DNA
ctctactgtccgatctgtggctttgcttgtactcagaaaggtaacctcctccgccacattaaactg

SEQ ID NO: 1186 - DNA, 66 bp, Synthetic construct; identical to SEQ ID NO: 693
  source 1..66: mol_type = other DNA

SEQ ID NO: 1187 - DNA, 66 bp, Synthetic construct
  source 1..66: mol_type = other DNA
ctcgcatgcccaatctgtggctttgggtgcactcagaaaggtaacctcctccgccacattaaactg

SEQ ID NO: 1188 - DNA, 66 bp, Synthetic construct
  source 1..66: mol_type = other DNA
ttcgactgtgaggtgtgtggggcacactttactcagaaaggtaacctcctccgccacattaaactg

SEQ ID NO: 1189 - DNA, 66 bp, Synthetic construct
  source 1..66: mol_type = other DNA
ttctggtgtgagatttgtggggcagagtttactcagaaaggtaacctcctccgccacattaaactg

SEQ ID NO: 1190 - DNA, 66 bp, Synthetic construct
  source 1..66: mol_type = other DNA
ttccattgtgagatttgtggggcatgctttactcagaaaggtaacctcctccgccacattaaactg

SEQ ID NO: 1191 - DNA, 66 bp, Synthetic construct
  source 1..66: mol_type = other DNA
ctgggctgccccatatgtgggttcaactgcactcagaaaggtaacctcctccgccacattaaactg

SEQ ID NO: 1192 - DNA, 66 bp, Synthetic construct
  source 1..66: mol_type = other DNA
ttcttctgtgatgtttgtggggcaccttttactcagaaaggtaacctcctccgccacattaaactg

SEQ ID NO: 1193 - DNA, 66 bp, Synthetic construct
  source 1..66: mol_type = other DNA
ttctgctgtcctgtgtgtggggcaggttttactcagaaaggtaacctcctccgccacattaaactg

SEQ ID NO: 1194 - DNA, 66 bp, Synthetic construct
  source 1..66: mol_type = other DNA
ttccactgtcctgtttgtggggcagcatttactcagaaaggtaacctcctccgccacattaaactg

SEQ ID NO: 1195 - DNA, 66 bp, Synthetic construct; identical to SEQ ID NO: 174
  source 1..66: mol_type = other DNA

SEQ ID NO: 1196 - DNA, 66 bp, Synthetic construct
  source 1..66: mol_type = other DNA
ttcaattgtcctatatgtggggcagcctttactcagaaaggtaacctcctccgccacattaaactg

SEQ ID NO: 1197 - DNA, 66 bp, Synthetic construct
  source 1..66: mol_type = other DNA
ttctggtgtaacatctgtggggcatgttttactcagaaaggtaacctcctccgccacattaaactg

SEQ ID NO: 1198 - DNA, 66 bp, Synthetic construct
  source 1..66: mol_type = other DNA
ttctactgtaatgtatgtggggcaccgtttactcagaaaggtaacctcctccgccacattaaactg

SEQ ID NO: 1199 - DNA, 66 bp, Synthetic construct; identical to SEQ ID NO: 489
  source 1..66: mol_type = other DNA

SEQ ID NO: 1200 - DNA, 66 bp, Synthetic construct
  source 1..66: mol_type = other DNA
ttcggctgtcccgtgtgtggggcattttttactcagaaaggtaacctcctccgccacattaaactg

SEQ ID NO: 1201 - DNA, 66 bp, Synthetic construct
  source 1..66: mol_type = other DNA
ctatggtgccccatctgcggctttgcctgcactcagaaaggtaacctcctccgccacattaaactg

SEQ ID NO: 1202 - DNA, 66 bp, Synthetic construct
  source 1..66: mol_type = other DNA
ttatactgtccaatttgtggttttatttgcactcagaaaggtaacctcctccgccacattaaactg

SEQ ID NO: 1203 - DNA, 66 bp, Synthetic construct; identical to SEQ ID NO: 89
  source 1..66: mol_type = other DNA

SEQ ID NO: 1204 - DNA, 66 bp, Synthetic construct
  source 1..66: mol_type = other DNA
ttcgcctgtaacatttgtggggcaaggtttactcagaaaggtaacctcctccgccacattaaactg

SEQ ID NO: 1205 - DNA, 66 bp, Synthetic construct
  source 1..66: mol_type = other DNA
ttcgcatgtgaagtttgtggggcaaattttactcagaaaggtaacctcctccgccacattaaactg

SEQ ID NO: 1206 - DNA, 66 bp, Synthetic construct
  source 1..66: mol_type = other DNA
ttctggtgtcccatctgtggggcaaagtttactcagaaaggtaacctcctccgccacattaaactg

SEQ ID NO: 1207 - DNA, 66 bp, Synthetic construct
  source 1..66: mol_type = other DNA
ctgttttgccccatctgcggctttcactgtactcagaaaggtaacctcctccgccacattaaactg

SEQ ID NO: 1208 - DNA, 66 bp, Synthetic construct
  source 1..66: mol_type = other DNA
ttcgcttgtgaaatctgtggggcaaactttactcagaaaggtaacctcctccgccacattaaactg

SEQ ID NO: 1209 - DNA, 66 bp, Synthetic construct
  source 1..66: mol_type = other DNA
ttcggctgtcccatctgtggggcatattttactcagaaaggtaacctcctccgccacattaaactg

SEQ ID NO: 1210 - DNA, 66 bp, Synthetic construct
  source 1..66: mol_type = other DNA
ttccactgtgaggtgtgtggggcatcttttactcagaaaggtaacctcctccgccacattaaactg

SEQ ID NO: 1211 - DNA, 66 bp, Synthetic construct
  source 1..66: mol_type = other DNA
ttcggctgtgagatttgtggggcaatttttactcagaaaggtaacctcctccgccacattaaactg

SEQ ID NO: 1212 - DNA, 66 bp, Synthetic construct
  source 1..66: mol_type = other DNA
ttctggtgtgaaatctgtggggcactgtttactcagaaaggtaacctcctccgccacattaaactg

SEQ ID NO: 1213 - DNA, 66 bp, Synthetic construct
  source 1..66: mol_type = other DNA
ttctactgtccagtctgtggggcagcttttactcagaaaggtaacctcctccgccacattaaactg

SEQ ID NO: 1214 - DNA, 66 bp, Synthetic construct
  source 1..66: mol_type = other DNA
ttcgcctgtccggtatgtggggcacattttactcagaaaggtaacctcctccgccacattaaactg

SEQ ID NO: 1215 - DNA, 66 bp, Synthetic construct
  source 1..66: mol_type = other DNA
ctcgcttgtcccatctgcgggttcatgtgcactcagaaaggtaacctcctccgccacattaaactg

SEQ ID NO: 1216 - DNA, 66 bp, Synthetic construct
  source 1..66: mol_type = other DNA
ttctactgtgatatatgtggggcagtttttactcagaaaggtaacctcctccgccacattaaactg

SEQ ID NO: 1217 - DNA, 66 bp, Synthetic construct
  source 1..66: mol_type = other DNA
ttcttttgtcccatatgtggggcaaagtttactcagaaaggtaacctcctccgccacattaaactg

SEQ ID NO: 1218 - DNA, 66 bp, Synthetic construct
  source 1..66: mol_type = other DNA
ttctggtgtgatgtctgtggggcaaagtttactcagaaaggtaacctcctccgccacattaaactg

SEQ ID NO: 1219 - DNA, 66 bp, Synthetic construct
  source 1..66: mol_type = other DNA
ttcttctgtgacatctgtggggcagcctttactcagaaaggtaacctcctccgccacattaaactg

SEQ ID NO: 1220 - DNA, 66 bp, Synthetic construct
  source 1..66: mol_type = other DNA
ttccattgtgaagtgtgtggggcaaagtttactcagaaaggtaacctcctccgccacattaaactg

SEQ ID NO: 1221 - DNA, 66 bp, Synthetic construct
  source 1..66: mol_type = other DNA
ttcgcctgtcccatctgtggggcagtatttactcagaaaggtaacctcctccgccacattaaactg

SEQ ID NO: 1222 - DNA, 66 bp, Synthetic construct
  source 1..66: mol_type = other DNA
ttctggtgtcccgtgtgtggggcaggttttactcagaaaggtaacctcctccgccacattaaactg

SEQ ID NO: 1223 - DNA, 66 bp, Synthetic construct
  source 1..66: mol_type = other DNA
ttctggtgtgatatctgtggggcaccctttactcagaaaggtaacctcctccgccacattaaactg

SEQ ID NO: 1224 - DNA, 66 bp, Synthetic construct
  source 1..66: mol_type = other DNA
ttcttctgtgacatttgtggggcaacctttactcagaaaggtaacctcctccgccacattaaactg

SEQ ID NO: 1225 - DNA, 66 bp, Synthetic construct
  source 1..66: mol_type = other DNA
ctatggtgcgaaatatgcggattctgttgcactcagaaaggtaacctcctccgccacattaaactg

SEQ ID NO: 1226 - DNA, 66 bp, Synthetic construct
  source 1..66: mol_type = other DNA
ttcgattgtcctgtctgtggggcacactttactcagaaaggtaacctcctccgccacattaaactg

SEQ ID NO: 1227 - DNA, 66 bp, Synthetic construct
  source 1..66: mol_type = other DNA
ttcaattgtccaatctgtggggcagggtttactcagaaaggtaacctcctccgccacattaaactg

SEQ ID NO: 1228 - DNA, 66 bp, Synthetic construct
  source 1..66: mol_type = other DNA
ttctactgtcctgtttgtggggcatactttactcagaaaggtaacctcctccgccacattaaactg

SEQ ID NO: 1229 - DNA, 66 bp, Synthetic construct; identical to SEQ ID NO: 755
  source 1..66: mol_type = other DNA

SEQ ID NO: 1230 - DNA, 66 bp, Synthetic construct
  source 1..66: mol_type = other DNA
ttcttttgtgacatatgtggggcaggttttactcagaaaggtaacctcctccgccacattaaactg

SEQ ID NO: 1231 - DNA, 66 bp, Synthetic construct
  source 1..66: mol_type = other DNA
ttctattgtgaagtttgtggggcaatctttactcagaaaggtaacctcctccgccacattaaactg

SEQ ID NO: 1232 - DNA, 66 bp, Synthetic construct
  source 1..66: mol_type = other DNA
ttctggtgtgacgtgtgtggggcacgctttactcagaaaggtaacctcctccgccacattaaactg

SEQ ID NO: 1233 - DNA, 66 bp, Synthetic construct; identical to SEQ ID NO: 37
  source 1..66: mol_type = other DNA

SEQ ID NO: 1234 - DNA, 66 bp, Synthetic construct
  source 1..66: mol_type = other DNA
ttctcttgtgaagtatgtggggcaccctttactcagaaaggtaacctcctccgccacattaaactg

SEQ ID NO: 1235 - DNA, 66 bp, Synthetic construct
  source 1..66: mol_type = other DNA
ttctattgtcctgtgtgtggggcacactttactcagaaaggtaacctcctccgccacattaaactg

SEQ ID NO: 1236 - DNA, 66 bp, Synthetic construct
  source 1..66: mol_type = other DNA
ttcgggtgtcctatttgtggggcacactttactcagaaaggtaacctcctccgccacattaaactg

SEQ ID NO: 1237 - DNA, 66 bp, Synthetic construct; identical to SEQ ID NO: 508
  source 1..66: mol_type = other DNA

SEQ ID NO: 1238 - DNA, 66 bp, Synthetic construct
  source 1..66: mol_type = other DNA
ttctactgtccggtgtgtggggcacaatttactcagaaaggtaacctcctccgccacattaaactg

SEQ ID NO: 1239 - DNA, 66 bp, Synthetic construct; identical to SEQ ID NO: 104
  source 1..66: mol_type = other DNA

SEQ ID NO: 1240 - DNA, 66 bp, Synthetic construct
  source 1..66: mol_type = other DNA
ttcaactgtgagatatgtggggcacaatttactcagaaaggtaacctcctccgccacattaaactg

SEQ ID NO: 1241 - DNA, 66 bp, Synthetic construct
  source 1..66: mol_type = other DNA
ttcggatgtgaaatttgtggggcagtgtttactcagaaaggtaacctcctccgccacattaaactg

SEQ ID NO: 1242 - DNA, 66 bp, Synthetic construct
  source 1..66: mol_type = other DNA
ctgttttgtccaatctgcgggttctattgcactcagaaaggtaacctcctccgccacattaaactg

SEQ ID NO: 1243 - DNA, 66 bp, Synthetic construct
  source 1..66: mol_type = other DNA
ttcttctgtcccgtgtgtggggcagcatttactcagaaaggtaacctcctccgccacattaaactg

SEQ ID NO: 1244 - DNA, 66 bp, Synthetic construct
  source 1..66: mol_type = other DNA
ttctgctgtgacatttgtggggcagcatttactcagaaaggtaacctcctccgccacattaaactg

SEQ ID NO: 1245 - DNA, 66 bp, Synthetic construct
  source 1..66: mol_type = other DNA
ttctggtgtaatatctgtggggcaccatttactcagaaaggtaacctcctccgccacattaaactg

SEQ ID NO: 1246 - DNA, 66 bp, Synthetic construct; identical to SEQ ID NO: 656
  source 1..66: mol_type = other DNA

SEQ ID NO: 1247 - DNA, 66 bp, Synthetic construct
  source 1..66: mol_type = other DNA
ctgtggtgcgagatttgtggatttgtatgcactcagaaaggtaacctcctccgccacattaaactg

SEQ ID NO: 1248 - DNA, 66 bp, Synthetic construct
  source 1..66: mol_type = other DNA
ttctggtgtgacatctgtggggcacagtttactcagaaaggtaacctcctccgccacattaaactg

SEQ ID NO: 1249 - DNA, 66 bp, Synthetic construct
  source 1..66: mol_type = other DNA
ttcgggtgtgaggtctgtggggcagcttttactcagaaaggtaacctcctccgccacattaaactg

SEQ ID NO: 1250 - DNA, 66 bp, Synthetic construct
  source 1..66: mol_type = other DNA
ttcaactgtccagtgtgtggggcagggtttactcagaaaggtaacctcctccgccacattaaactg

SEQ ID NO: 1251 - DNA, 66 bp, Synthetic construct
  source 1..66: mol_type = other DNA
ttctactgtcctatttgtggggcagtgtttactcagaaaggtaacctcctccgccacattaaactg

SEQ ID NO: 1252 - DNA, 66 bp, Synthetic construct
  source 1..66: mol_type = other DNA
ctctggtgccccatctgcggattcgtgtgcactcagaaaggtaacctcctccgccacattaaactg

SEQ ID NO: 1253 - DNA, 66 bp, Synthetic construct
  source 1..66: mol_type = other DNA
ttcggctgccccatttgcggcaggcagtttactcagaaaggtaacctcctccgccacattaaactg

SEQ ID NO: 1254 - DNA, 66 bp, Synthetic construct
  source 1..66: mol_type = other DNA
ttcggatgtgaagtctgtggggcagtgtttactcagaaaggtaacctcctccgccacattaaactg

SEQ ID NO: 1255 - DNA, 66 bp, Synthetic construct
  source 1..66: mol_type = other DNA
ttcttttgtccgatttgtggggcatactttactcagaaaggtaacctcctccgccacattaaactg

SEQ ID NO: 1256 - DNA, 66 bp, Synthetic construct
  source 1..66: mol_type = other DNA
ttcttctgtgaggtgtgtggggcagtgtttactcagaaaggtaacctcctccgccacattaaactg

SEQ ID NO: 1257 - DNA, 66 bp, Synthetic construct
  source 1..66: mol_type = other DNA
ttctactgtccaatctgtggggcagcatttactcagaaaggtaacctcctccgccacattaaactg

SEQ ID NO: 1258 - DNA, 66 bp, Synthetic construct; identical to SEQ ID NO: 459
  source 1..66: mol_type = other DNA

SEQ ID NO: 1259 - DNA, 66 bp, Synthetic construct
  source 1..66: mol_type = other DNA
ttctcgtgtgaaatctgtggggcacagtttactcagaaaggtaacctcctccgccacattaaactg

SEQ ID NO: 1260 - DNA, 66 bp, Synthetic construct
  source 1..66: mol_type = other DNA
ttcttctgtccggtgtgtggggcagaatttactcagaaaggtaacctcctccgccacattaaactg

SEQ ID NO: 1261 - DNA, 66 bp, Synthetic construct
  source 1..66: mol_type = other DNA
ctgtggtgccccatttgtggcttcatgtgtactcagaaaggtaacctcctccgccacattaaactg

SEQ ID NO: 1262 - DNA, 66 bp, Synthetic construct
  source 1..66: mol_type = other DNA
ttctattgtaacatatgtggggcatgttttactcagaaaggtaacctcctccgccacattaaactg

SEQ ID NO: 1263 - DNA, 66 bp, Synthetic construct
  source 1..66: mol_type = other DNA
ttcggctgtccagtatgtggggcacactttactcagaaaggtaacctcctccgccacattaaactg

SEQ ID NO: 1264 - DNA, 66 bp, Synthetic construct
  source 1..66: mol_type = other DNA
ttcgcgtgtcccatttgtggggcatattttactcagaaaggtaacctcctccgccacattaaactg

SEQ ID NO: 1265 - DNA, 66 bp, Synthetic construct
  source 1..66: mol_type = other DNA
ttctggtgtgaggtctgtggggcatactttactcagaaaggtaacctcctccgccacattaaactg

SEQ ID NO: 1266 - DNA, 66 bp, Synthetic construct
  source 1..66: mol_type = other DNA
ttcgcctgtgacatctgtggggcatgctttactcagaaaggtaacctcctccgccacattaaactg

SEQ ID NO: 1267 - DNA, 66 bp, Synthetic construct
  source 1..66: mol_type = other DNA
ttccattgtccggtgtgtggggcaggctttactcagaaaggtaacctcctccgccacattaaactg

SEQ ID NO: 1268 - DNA, 66 bp, Synthetic construct
  source 1..66: mol_type = other DNA
ctttactgtcccatatgcgggtttttctgtactcagaaaggtaacctcctccgccacattaaactg

SEQ ID NO: 1269 - DNA, 66 bp, Synthetic construct
  source 1..66: mol_type = other DNA
ttcaactgtcccatctgtggggcatcttttactcagaaaggtaacctcctccgccacattaaactg

SEQ ID NO: 1270 - DNA, 66 bp, Synthetic construct
  source 1..66: mol_type = other DNA
ttcttttgtgacatctgtggggcagtgtttactcagaaaggtaacctcctccgccacattaaactg

SEQ ID NO: 1271 - DNA, 66 bp, Synthetic construct
  source 1..66: mol_type = other DNA
ttcggatgtccagtatgtggggcaaactttactcagaaaggtaacctcctccgccacattaaactg

SEQ ID NO: 1272 - DNA, 66 bp, Synthetic construct
  source 1..66: mol_type = other DNA
ttctcatgtcctatatgtggggcatgttttactcagaaaggtaacctcctccgccacattaaactg

SEQ ID NO: 1273 - DNA, 66 bp, Synthetic construct
  source 1..66: mol_type = other DNA
ttcgcctgtgatgtctgtggggcagcttttactcagaaaggtaacctcctccgccacattaaactg

SEQ ID NO: 1274 - DNA, 66 bp, Synthetic construct
  source 1..66: mol_type = other DNA
ttctattgtccaatctgtggggcattgtttactcagaaaggtaacctcctccgccacattaaactg

SEQ ID NO: 1275 - DNA, 66 bp, Synthetic construct
  source 1..66: mol_type = other DNA
ttcttctgtgaggtctgtggggcaaactttactcagaaaggtaacctcctccgccacattaaactg

SEQ ID NO: 1276 - DNA, 66 bp, Synthetic construct
  source 1..66: mol_type = other DNA
ttctggtgtgaggtgtgtggggcagtctttactcagaaaggtaacctcctccgccacattaaactg

SEQ ID NO: 1277 - DNA, 66 bp, Synthetic construct; identical to SEQ ID NO: 91
  source 1..66: mol_type = other DNA

SEQ ID NO: 1278 - DNA, 66 bp, Synthetic construct
  source 1..66: mol_type = other DNA
ttctcctgtgaaatttgtggggcaacttttactcagaaaggtaacctcctccgccacattaaactg

SEQ ID NO: 1279 - DNA, 66 bp, Synthetic construct; identical to SEQ ID NO: 189
  source 1..66: mol_type = other DNA

SEQ ID NO: 1280 - DNA, 66 bp, Synthetic construct
  source 1..66: mol_type = other DNA
ttctattgtcccgtgtgtggggcagagtttactcagaaaggtaacctcctccgccacattaaactg

SEQ ID NO: 1281 - DNA, 66 bp, Synthetic construct
  source 1..66: mol_type = other DNA
ttcgcctgtcctgtctgtggggcaatgtttactcagaaaggtaacctcctccgccacattaaactg

SEQ ID NO: 1282 - DNA, 66 bp, Synthetic construct
  source 1..66: mol_type = other DNA
ttctcttgtccgatttgtggggcagggtttactcagaaaggtaacctcctccgccacattaaactg

SEQ ID NO: 1283 - DNA, 66 bp, Synthetic construct
  source 1..66: mol_type = other DNA
tttggttgcccaatctgcgggaggacatttactcagaaaggtaacctcctccgccacattaaactg

SEQ ID NO: 1284 - DNA, 66 bp, Synthetic construct
  source 1..66: mol_type = other DNA
ttcttttgtgacgtttgtggggcacaatttactcagaaaggtaacctcctccgccacattaaactg

SEQ ID NO: 1285 - DNA, 66 bp, Synthetic construct
  source 1..66: mol_type = other DNA
ctacattgtcctatctgcggctttgggtgtactcagaaaggtaacctcctccgccacattaaactg

SEQ ID NO: 1286 - DNA, 66 bp, Synthetic construct
  source 1..66: mol_type = other DNA
ttctactgtccagtctgtggggcaaattttactcagaaaggtaacctcctccgccacattaaactg

SEQ ID NO: 1287 - DNA, 66 bp, Synthetic construct
  source 1..66: mol_type = other DNA
ttaagctgcgagatttgtggctttagatgcactcagaaaggtaacctcctccgccacattaaactg

SEQ ID NO: 1288 - DNA, 66 bp, Synthetic construct
  source 1..66: mol_type = other DNA
ttcgcttgtgatgtatgtggggcacggtttactcagaaaggtaacctcctccgccacattaaactg

SEQ ID NO: 1289 - DNA, 66 bp, Synthetic construct
  source 1..66: mol_type = other DNA
ttctattgtccggtgtgtggggcaacttttactcagaaaggtaacctcctccgccacattaaactg

SEQ ID NO: 1290 - DNA, 66 bp, Synthetic construct
  source 1..66: mol_type = other DNA
ttcgattgtgaagtctgtggggcatcttttactcagaaaggtaacctcctccgccacattaaactg

SEQ ID NO: 1291 - DNA, 66 bp, Synthetic construct
  source 1..66: mol_type = other DNA
ttcttttgtcccatatgtggggcaacgtttactcagaaaggtaacctcctccgccacattaaactg

SEQ ID NO: 1292 - DNA, 66 bp, Synthetic construct; identical to SEQ ID NO: 196
  source 1..66: mol_type = other DNA

SEQ ID NO: 1293 - DNA, 66 bp, Synthetic construct
  source 1..66: mol_type = other DNA
ttctggtgtgacatttgtggggcaaactttactcagaaaggtaacctcctccgccacattaaactg

SEQ ID NO: 1294 - DNA, 66 bp, Synthetic construct
  source 1..66: mol_type = other DNA
ctgttttgtcccatctgtggcttcaagtgtactcagaaaggtaacctcctccgccacattaaactg

SEQ ID NO: 1295 - DNA, 66 bp, Synthetic construct
  source 1..66: mol_type = other DNA
ttcatgtgtgagatctgtggggcaggttttactcagaaaggtaacctcctccgccacattaaactg

SEQ ID NO: 1296 - DNA, 66 bp, Synthetic construct; identical to SEQ ID NO: 453
  source 1..66: mol_type = other DNA

SEQ ID NO: 1297 - DNA, 66 bp, Synthetic construct
  source 1..66: mol_type = other DNA
ttcttctgtcccatttgtggggcaaattttactcagaaaggtaacctcctccgccacattaaactg

SEQ ID NO: 1298 - DNA, 66 bp, Synthetic construct
  source 1..66: mol_type = other DNA
ttcgcctgtcctatctgtggggcaatgtttactcagaaaggtaacctcctccgccacattaaactg

SEQ ID NO: 1299 - DNA, 66 bp, Synthetic construct
  source 1..66: mol_type = other DNA
ctgttctgccccatctgcggattcgagtgtactcagaaaggtaacctcctccgccacattaaactg

SEQ ID NO: 1300 - DNA, 66 bp, Synthetic construct; identical to SEQ ID NO: 210
  source 1..66: mol_type = other DNA

SEQ ID NO: 1301 - DNA, 66 bp, Synthetic construct
  source 1..66: mol_type = other DNA
ttcttctgtgaggtttgtggggcacactttactcagaaaggtaacctcctccgccacattaaactg

SEQ ID NO: 1302 - DNA, 66 bp, Synthetic construct
  source 1..66: mol_type = other DNA
ttcttctgtaacgtgtgtggggcaccctttactcagaaaggtaacctcctccgccacattaaactg

SEQ ID NO: 1303 - DNA, 66 bp, Synthetic construct
  source 1..66: mol_type = other DNA
ctcttctgcgaaatctgcgggttcatatgtactcagaaaggtaacctcctccgccacattaaactg

SEQ ID NO: 1304 - DNA, 66 bp, Synthetic construct; identical to SEQ ID NO: 599
  source 1..66: mol_type = other DNA

SEQ ID NO: 1305 - DNA, 66 bp, Synthetic construct
  source 1..66: mol_type = other DNA
ttcttctgtcccgtgtgtggggcaaagtttactcagaaaggtaacctcctccgccacattaaactg

SEQ ID NO: 1306 - DNA, 66 bp, Synthetic construct
  source 1..66: mol_type = other DNA
ttcgggtgtccaatctgtggggcaaactttactcagaaaggtaacctcctccgccacattaaactg

SEQ ID NO: 1307 - DNA, 66 bp, Synthetic construct
  source 1..66: mol_type = other DNA
ttctattgtgatatttgtggggcaaactttactcagaaaggtaacctcctccgccacattaaactg

SEQ ID NO: 1308 - DNA, 66 bp, Synthetic construct
  source 1..66: mol_type = other DNA
ttctggtgtgacatttgtggggcaatgtttactcagaaaggtaacctcctccgccacattaaactg

SEQ ID NO: 1309 - DNA, 66 bp, Synthetic construct; identical to SEQ ID NO: 617
  source 1..66: mol_type = other DNA

SEQ ID NO: 1310 - DNA, 66 bp, Synthetic construct
  source 1..66: mol_type = other DNA
ttcaattgtcccgtatgtggggcaagttttactcagaaaggtaacctcctccgccacattaaactg

SEQ ID NO: 1311 - DNA, 66 bp, Synthetic construct
  source 1..66: mol_type = other DNA
ttctggtgtcctatttgtggggcacgatttactcagaaaggtaacctcctccgccacattaaactg

SEQ ID NO: 1312 - DNA, 66 bp, Synthetic construct
  source 1..66: mol_type = other DNA
ttccgttgtgagatctgtggggcaggttttactcagaaaggtaacctcctccgccacattaaactg

SEQ ID NO: 1313 - DNA, 66 bp, Synthetic construct
  source 1..66: mol_type = other DNA
ttctcttgtccagtatgtggggcacgatttactcagaaaggtaacctcctccgccacattaaactg

SEQ ID NO: 1314 - DNA, 66 bp, Synthetic construct
  source 1..66: mol_type = other DNA
ctgtggtgtcccatctgcggcttttattgcactcagaaaggtaacctcctccgccacattaaactg

SEQ ID NO: 1315 - DNA, 66 bp, Synthetic construct
  source 1..66: mol_type = other DNA
ttgtattgtccgatctgcgggttcgagtgcactcagaaaggtaacctcctccgccacattaaactg

SEQ ID NO: 1316 - DNA, 66 bp, Synthetic construct
  source 1..66: mol_type = other DNA
ttcttctgtcccatctgtggggcagtctttactcagaaaggtaacctcctccgccacattaaactg

SEQ ID NO: 1317 - DNA, 66 bp, Synthetic construct
  source 1..66: mol_type = other DNA
ttctggtgtgatgtatgtggggcatgctttactcagaaaggtaacctcctccgccacattaaactg

SEQ ID NO: 1318 - DNA, 66 bp, Synthetic construct
  source 1..66: mol_type = other DNA
ttctcatgtcccatctgtggggcaacttttactcagaaaggtaacctcctccgccacattaaactg

SEQ ID NO: 1319 - DNA, 66 bp, Synthetic construct
  source 1..66: mol_type = other DNA
ttcgcctgtaacatttgtggggcagcatttactcagaaaggtaacctcctccgccacattaaactg

SEQ ID NO: 1320 - DNA, 66 bp, Synthetic construct
  source 1..66: mol_type = other DNA
ttctcctgtgaggtgtgtggggcacagtttactcagaaaggtaacctcctccgccacattaaactg

SEQ ID NO: 1321 - DNA, 66 bp, Synthetic construct
  source 1..66: mol_type = other DNA
ttccactgtcctatctgtggggcatcctttactcagaaaggtaacctcctccgccacattaaactg

SEQ ID NO: 1322 - DNA, 66 bp, Synthetic construct
  source 1..66: mol_type = other DNA
ttcgcgtgtcctatttgtggggcaatctttactcagaaaggtaacctcctccgccacattaaactg

SEQ ID NO: 1323 - DNA, 66 bp, Synthetic construct
  source 1..66: mol_type = other DNA
ttctattgtgaggtctgtggggcattctttactcagaaaggtaacctcctccgccacattaaactg

SEQ ID NO: 1324 - DNA, 66 bp, Synthetic construct
  source 1..66: mol_type = other DNA
ttcttctgtgatgtgtgtggggcaaaatttactcagaaaggtaacctcctccgccacattaaactg

SEQ ID NO: 1325 - DNA, 66 bp, Synthetic construct
  source 1..66: mol_type = other DNA
ttcgcatgtccaatctgtggggcagactttactcagaaaggtaacctcctccgccacattaaactg

SEQ ID NO: 1326 - DNA, 66 bp, Synthetic construct; identical to SEQ ID NO: 570
  source 1..66: mol_type = other DNA

SEQ ID NO: 1327 - DNA, 66 bp, Synthetic construct; identical to SEQ ID NO: 421
  source 1..66: mol_type = other DNA

SEQ ID NO: 1328 - DNA, 66 bp, Synthetic construct
  source 1..66: mol_type = other DNA
ttctggtgtgaagtttgtggggcaacatttactcagaaaggtaacctcctccgccacattaaactg

SEQ ID NO: 1329 - DNA, 66 bp, Synthetic construct
  source 1..66: mol_type = other DNA
ttctattgtcctatatgtggggcaatttttactcagaaaggtaacctcctccgccacattaaactg

SEQ ID NO: 1330 - DNA, 66 bp, Synthetic construct; identical to SEQ ID NO: 550
  source 1..66: mol_type = other DNA

SEQ ID NO: 1331 - DNA, 66 bp, Synthetic construct
  source 1..66: mol_type = other DNA
ctgagttgcgaaatctgcggcttcagctgtactcagaaaggtaacctcctccgccacattaaactg

SEQ ID NO: 1332 - DNA, 66 bp, Synthetic construct; identical to SEQ ID NO: 481
  source 1..66: mol_type = other DNA

SEQ ID NO: 1333 - DNA, 66 bp, Synthetic construct
  source 1..66: mol_type = other DNA
ttctggtgtgatatctgtggggcaacatttactcagaaaggtaacctcctccgccacattaaactg

SEQ ID NO: 1334 - DNA, 66 bp, Synthetic construct
  source 1..66: mol_type = other DNA
ctgttttgcgaaatctgcggatttcattgtactcagaaaggtaacctcctccgccacattaaactg

SEQ ID NO: 1335 - DNA, 66 bp, Synthetic construct
  source 1..66: mol_type = other DNA
ttctggtgtccagtgtgtggggcaaagtttactcagaaaggtaacctcctccgccacattaaactg

SEQ ID NO: 1336 - DNA, 66 bp, Synthetic construct
  source 1..66: mol_type = other DNA
ttctactgcccaatttgcggccggccatttactcagaaaggtaacctcctccgccacattaaactg

SEQ ID NO: 1337 - DNA, 66 bp, Synthetic construct
  source 1..66: mol_type = other DNA
ctgtggtgtccaatctgcggttttggctgcactcagaaaggtaacctcctccgccacattaaactg

SEQ ID NO: 1338 - DNA, 66 bp, Synthetic construct
  source 1..66: mol_type = other DNA
ttctattgtaacatttgtggggcaggctttactcagaaaggtaacctcctccgccacattaaactg

SEQ ID NO: 1339 - DNA, 66 bp, Synthetic construct
  source 1..66: mol_type = other DNA
ctgtggtgtcctatctgcgggttccactgtactcagaaaggtaacctcctccgccacattaaactg

SEQ ID NO: 1340 - DNA, 66 bp, Synthetic construct
  source 1..66: mol_type = other DNA
ttcgactgtcccgtctgtggggcatcctttactcagaaaggtaacctcctccgccacattaaactg

SEQ ID NO: 1341 - DNA, 66 bp, Synthetic construct
  source 1..66: mol_type = other DNA
ttcgcctgtgacatttgtggggcaacttttactcagaaaggtaacctcctccgccacattaaactg

SEQ ID NO: 1342 - DNA, 66 bp, Synthetic construct
  source 1..66: mol_type = other DNA
ttcagctgtgaggtttgtggggcaacttttactcagaaaggtaacctcctccgccacattaaactg

SEQ ID NO: 1343 - DNA, 66 bp, Synthetic construct
  source 1..66: mol_type = other DNA
ctgtggtgcgaaatttgcgggtttcattgcactcagaaaggtaacctcctccgccacattaaactg

SEQ ID NO: 1344 - DNA, 66 bp, Synthetic construct
  source 1..66: mol_type = other DNA
ttctcttgtgaaatttgtggggcagtctttactcagaaaggtaacctcctccgccacattaaactg

SEQ ID NO: 1345 - DNA, 66 bp, Synthetic construct
  source 1..66: mol_type = other DNA
ttcttctgtcctatttgtggggcattttttactcagaaaggtaacctcctccgccacattaaactg

SEQ ID NO: 1346 - DNA, 66 bp, Synthetic construct
  source 1..66: mol_type = other DNA
ttcagctgtcccgtctgtggggcaggatttactcagaaaggtaacctcctccgccacattaaactg

SEQ ID NO: 1347 - DNA, 66 bp, Synthetic construct
  source 1..66: mol_type = other DNA
ctatactgtgaaatctgcggattcgggtgcactcagaaaggtaacctcctccgccacattaaactg

SEQ ID NO: 1348 - DNA, 66 bp, Synthetic construct; identical to SEQ ID NO: 34
  source 1..66: mol_type = other DNA

SEQ ID NO: 1349 - DNA, 66 bp, Synthetic construct
  source 1..66: mol_type = other DNA
ttcgcatgtcccgtttgtggggcatattttactcagaaaggtaacctcctccgccacattaaactg

SEQ ID NO: 1350 - DNA, 66 bp, Synthetic construct
  source 1..66: mol_type = other DNA
ctgggctgcccaatttgcggctttcactgcactcagaaaggtaacctcctccgccacattaaactg

SEQ ID NO: 1351 - DNA, 66 bp, Synthetic construct
  source 1..66: mol_type = other DNA
ttctcttgtcctgtttgtggggcaacatttactcagaaaggtaacctcctccgccacattaaactg

SEQ ID NO: 1352 - DNA, 66 bp, Synthetic construct
  source 1..66: mol_type = other DNA
ttcttctgtgaggtgtgtggggcaacatttactcagaaaggtaacctcctccgccacattaaactg

SEQ ID NO: 1353 - DNA, 66 bp, Synthetic construct
  source 1..66: mol_type = other DNA
ttccattgtgaaatatgtggggcacgatttactcagaaaggtaacctcctccgccacattaaactg

SEQ ID NO: 1354 - DNA, 66 bp, Synthetic construct
  source 1..66: mol_type = other DNA
ttctggtgtcctatttgtggggcatattttactcagaaaggtaacctcctccgccacattaaactg

SEQ ID NO: 1355 - DNA, 66 bp, Synthetic construct
  source 1..66: mol_type = other DNA
ttcaactgtgagatttgtggggcatgttttactcagaaaggtaacctcctccgccacattaaactg

SEQ ID NO: 1356 - DNA, 66 bp, Synthetic construct; identical to SEQ ID NO: 472
  source 1..66: mol_type = other DNA

SEQ ID NO: 1357 - DNA, 66 bp, Synthetic construct
  source 1..66: mol_type = other DNA
ctccactgtgagatttgtgggttccgatgcactcagaaaggtaacctcctccgccacattaaactg

SEQ ID NO: 1358 - DNA, 66 bp, Synthetic construct
  source 1..66: mol_type = other DNA
ttcgcatgtgaagtctgtggggcaatctttactcagaaaggtaacctcctccgccacattaaactg

SEQ ID NO: 1359 - DNA, 66 bp, Synthetic construct
  source 1..66: mol_type = other DNA
ttcatgtgtgacatttgtggggcaccctttactcagaaaggtaacctcctccgccacattaaactg

SEQ ID NO: 1360 - DNA, 66 bp, Synthetic construct
  source 1..66: mol_type = other DNA
ttccactgtcctatttgtggggcatgctttactcagaaaggtaacctcctccgccacattaaactg

SEQ ID NO: 1361 - DNA, 66 bp, Synthetic construct
  source 1..66: mol_type = other DNA
cttttctgcccaatctgcggattcatgtgtactcagaaaggtaacctcctccgccacattaaactg

SEQ ID NO: 1362 - DNA, 66 bp, Synthetic construct
  source 1..66: mol_type = other DNA
ttcgcatgtgagatatgtggggcactgtttactcagaaaggtaacctcctccgccacattaaactg

SEQ ID NO: 1363 - DNA, 66 bp, Synthetic construct
  source 1..66: mol_type = other DNA
ttcttttgtgacatatgtggggcagagtttactcagaaaggtaacctcctccgccacattaaactg

SEQ ID NO: 1364 - DNA, 66 bp, Synthetic construct
  source 1..66: mol_type = other DNA
ttcatgtgtccaatttgtggggcaggatttactcagaaaggtaacctcctccgccacattaaactg

SEQ ID NO: 1365 - DNA, 66 bp, Synthetic construct
  source 1..66: mol_type = other DNA
ttcaattgtgaggtttgtggggcaccctttactcagaaaggtaacctcctccgccacattaaactg

SEQ ID NO: 1366 - DNA, 66 bp, Synthetic construct
  source 1..66: mol_type = other DNA
ttctgttgtgatatctgtggggcaccttttactcagaaaggtaacctcctccgccacattaaactg

SEQ ID NO: 1367 - DNA, 66 bp, Synthetic construct; identical to SEQ ID NO: 707
  source 1..66: mol_type = other DNA

SEQ ID NO: 1368 - DNA, 66 bp, Synthetic construct
  source 1..66: mol_type = other DNA
ctgcactgcccaatttgcgggttctgctgtactcagaaaggtaacctcctccgccacattaaactg

SEQ ID NO: 1369 - DNA, 66 bp, Synthetic construct
  source 1..66: mol_type = other DNA
ttctggtgtccagtctgtggggcaatgtttactcagaaaggtaacctcctccgccacattaaactg

SEQ ID NO: 1370 - DNA, 66 bp, Synthetic construct
  source 1..66: mol_type = other DNA
ttcttttgtcctgtctgtggggcacattttactcagaaaggtaacctcctccgccacattaaactg

SEQ ID NO: 1371 - DNA, 66 bp, Synthetic construct
  source 1..66: mol_type = other DNA
ttcaaatgtgaaatatgtggggcaggttttactcagaaaggtaacctcctccgccacattaaactg

SEQ ID NO: 1372 - DNA, 66 bp, Synthetic construct
  source 1..66: mol_type = other DNA
ttctggtgtgacgtctgtggggcatcttttactcagaaaggtaacctcctccgccacattaaactg

SEQ ID NO: 1373 - DNA, 66 bp, Synthetic construct
  source 1..66: mol_type = other DNA
ttctactgtcccgtctgtggggcattctttactcagaaaggtaacctcctccgccacattaaactg

SEQ ID NO: 1374 - DNA, 66 bp, Synthetic construct
  source 1..66: mol_type = other DNA
ttctactgtgacatctgtggggcaacttttactcagaaaggtaacctcctccgccacattaaactg

SEQ ID NO: 1375 - DNA, 66 bp, Synthetic construct; identical to SEQ ID NO: 581
  source 1..66: mol_type = other DNA

SEQ ID NO: 1376 - DNA, 66 bp, Synthetic construct
  source 1..66: mol_type = other DNA
ttcttttgtcccgtgtgtggggcatattttactcagaaaggtaacctcctccgccacattaaactg

SEQ ID NO: 1377 - DNA, 66 bp, Synthetic construct
  source 1..66: mol_type = other DNA
ttctattgtgacgtatgtggggcaaaatttactcagaaaggtaacctcctccgccacattaaactg

SEQ ID NO: 1378 - DNA, 66 bp, Synthetic construct; identical to SEQ ID NO: 271
  source 1..66: mol_type = other DNA

SEQ ID NO: 1379 - DNA, 66 bp, Synthetic construct
  source 1..66: mol_type = other DNA
ttcaactgtcccgtgtgtggggcagcctttactcagaaaggtaacctcctccgccacattaaactg

SEQ ID NO: 1380 - DNA, 66 bp, Synthetic construct
  source 1..66: mol_type = other DNA
ttcaattgtgacatctgtggggcaccttttactcagaaaggtaacctcctccgccacattaaactg

SEQ ID NO: 1381 - DNA, 66 bp, Synthetic construct; identical to SEQ ID NO: 140
  source 1..66: mol_type = other DNA

SEQ ID NO: 1382 - DNA, 66 bp, Synthetic construct
  source 1..66: mol_type = other DNA
ttctggtgtgacgtttgtggggcacagtttactcagaaaggtaacctcctccgccacattaaactg

SEQ ID NO: 1383 - DNA, 66 bp, Synthetic construct
  source 1..66: mol_type = other DNA
ttcgcctgtgacgtatgtggggcaaagtttactcagaaaggtaacctcctccgccacattaaactg

SEQ ID NO: 1384 - DNA, 66 bp, Synthetic construct
  source 1..66: mol_type = other DNA
ttctggtgtcctgtgtgtggggcaagatttactcagaaaggtaacctcctccgccacattaaactg

SEQ ID NO: 1385 - DNA, 66 bp, Synthetic construct; identical to SEQ ID NO: 66
  source 1..66: mol_type = other DNA

SEQ ID NO: 1386 - DNA, 66 bp, Synthetic construct
  source 1..66: mol_type = other DNA
ttcttctgtgaggtgtgtggggcatactttactcagaaaggtaacctcctccgccacattaaactg

SEQ ID NO: 1387 - DNA, 66 bp, Synthetic construct
  source 1..66: mol_type = other DNA
ttcttctgtcctatctgtggggcacactttactcagaaaggtaacctcctccgccacattaaactg

SEQ ID NO: 1388 - DNA, 66 bp, Synthetic construct
  source 1..66: mol_type = other DNA
ttctggtgtccgatctgtggggcacattttactcagaaaggtaacctcctccgccacattaaactg

SEQ ID NO: 1389 - DNA, 66 bp, Synthetic construct
  source 1..66: mol_type = other DNA
ttcagatgtgaggtctgtggggcaggctttactcagaaaggtaacctcctccgccacattaaactg

SEQ ID NO: 1390 - DNA, 66 bp, Synthetic construct
  source 1..66: mol_type = other DNA
ttctattgtaatatctgtggggcagcctttactcagaaaggtaacctcctccgccacattaaactg

SEQ ID NO: 1391 - DNA, 66 bp, Synthetic construct
  source 1..66: mol_type = other DNA
ttctattgtccagtttgtggggcagtgtttactcagaaaggtaacctcctccgccacattaaactg

SEQ ID NO: 1392 - DNA, 66 bp, Synthetic construct; identical to SEQ ID NO: 60
  source 1..66: mol_type = other DNA

SEQ ID NO: 1393 - DNA, 66 bp, Synthetic construct; identical to SEQ ID NO: 732
  source 1..66: mol_type = other DNA

SEQ ID NO: 1394 - DNA, 66 bp, Synthetic construct
  source 1..66: mol_type = other DNA
ttctggtgtgaagtctgtggggcaatctttactcagaaaggtaacctcctccgccacattaaactg

SEQ ID NO: 1395 - DNA, 66 bp, Synthetic construct
  source 1..66: mol_type = other DNA
ttctattgtgatgtctgtggggcatcctttactcagaaaggtaacctcctccgccacattaaactg

SEQ ID NO: 1396 - DNA, 66 bp, Synthetic construct
  source 1..66: mol_type = other DNA
ttccattgtgagatctgtggggcacaatttactcagaaaggtaacctcctccgccacattaaactg

SEQ ID NO: 1397 - DNA, 66 bp, Synthetic construct
  source 1..66: mol_type = other DNA
ttctactgtgacatttgtggggcagagtttactcagaaaggtaacctcctccgccacattaaactg

SEQ ID NO: 1398 - DNA, 66 bp, Synthetic construct
  source 1..66: mol_type = other DNA
ttggcatgtgaaatctgcggttttatgtgtactcagaaaggtaacctcctccgccacattaaactg

SEQ ID NO: 1399 - DNA, 66 bp, Synthetic construct
  source 1..66: mol_type = other DNA
ttcaattgtgagatttgtggggcacactttactcagaaaggtaacctcctccgccacattaaactg

SEQ ID NO: 1400 - DNA, 66 bp, Synthetic construct; identical to SEQ ID NO: 68
  source 1..66: mol_type = other DNA

SEQ ID NO: 1401 - DNA, 66 bp, Synthetic construct
  source 1..66: mol_type = other DNA
ttctactgtcccatttgtggggcaatgtttactcagaaaggtaacctcctccgccacattaaactg

SEQ ID NO: 1402 - DNA, 66 bp, Synthetic construct; identical to SEQ ID NO: 691
  source 1..66: mol_type = other DNA

SEQ ID NO: 1403 - DNA, 66 bp, Synthetic construct
  source 1..66: mol_type = other DNA
ttcggttgtgagatctgtggggcactttttactcagaaaggtaacctcctccgccacattaaactg

SEQ ID NO: 1404 - DNA, 66 bp, Synthetic construct
  source 1..66: mol_type = other DNA
ttcggctgtccaatctgtggccgttgtttcactcagaaaggtaacctcctccgccacattaaactg

SEQ ID NO: 1405 - DNA, 66 bp, Synthetic construct
  source 1..66: mol_type = other DNA
ttatggtgtgagatctgtggctttgcctgtactcagaaaggtaacctcctccgccacattaaactg

SEQ ID NO: 1406 - DNA, 66 bp, Synthetic construct; identical to SEQ ID NO: 482
  source 1..66: mol_type = other DNA

SEQ ID NO: 1407 - DNA, 66 bp, Synthetic construct
  source 1..66: mol_type = other DNA
ttctcgtgtcctgtatgtggggcatgctttactcagaaaggtaacctcctccgccacattaaactg

SEQ ID NO: 1408 - DNA, 66 bp, Synthetic construct
  source 1..66: mol_type = other DNA
ctgttctgtccaatatgtggcttcatctgtactcagaaaggtaacctcctccgccacattaaactg

SEQ ID NO: 1409 - DNA, 66 bp, Synthetic construct
  source 1..66: mol_type = other DNA
ttcagctgtcccatttgtggggcaagatttactcagaaaggtaacctcctccgccacattaaactg

SEQ ID NO: 1410 - DNA, 66 bp, Synthetic construct
  source 1..66: mol_type = other DNA
ctgtggtgtcctatctgtgggtttaagtgtactcagaaaggtaacctcctccgccacattaaactg

SEQ ID NO: 1411 - DNA, 66 bp, Synthetic construct
  source 1..66: mol_type = other DNA
ttcgcctgtccaatatgtggggcagaatttactcagaaaggtaacctcctccgccacattaaactg

SEQ ID NO: 1412 - DNA, 66 bp, Synthetic construct
  source 1..66: mol_type = other DNA
ttcgcttgtccagtctgtggggcaaactttactcagaaaggtaacctcctccgccacattaaactg

SEQ ID NO: 1413 - DNA, 66 bp, Synthetic construct; identical to SEQ ID NO: 658
  source 1..66: mol_type = other DNA

SEQ ID NO: 1414 - DNA, 66 bp, Synthetic construct
  source 1..66: mol_type = other DNA
ttcgattgtgagatctgtggggcagcatttactcagaaaggtaacctcctccgccacattaaactg

SEQ ID NO: 1415 - DNA, 66 bp, Synthetic construct
  source 1..66: mol_type = other DNA
ttcgcttgtgaaatctgtggggcattctttactcagaaaggtaacctcctccgccacattaaactg

SEQ ID NO: 1416 - DNA, 66 bp, Synthetic construct
  source 1..66: mol_type = other DNA
ttctggtgtgacgtctgtggggcagcatttactcagaaaggtaacctcctccgccacattaaactg

SEQ ID NO: 1417 - DNA, 66 bp, Synthetic construct; identical to SEQ ID NO: 409
  source 1..66: mol_type = other DNA

SEQ ID NO: 1418 - DNA, 66 bp, Synthetic construct
  source 1..66: mol_type = other DNA
ttctattgtcccatctgtggggcaaagtttactcagaaaggtaacctcctccgccacattaaactg

SEQ ID NO: 1419 - DNA, 66 bp, Synthetic construct
  source 1..66: mol_type = other DNA
ttctggtgtaacatctgtggggcaaagtttactcagaaaggtaacctcctccgccacattaaactg

SEQ ID NO: 1420 - DNA, 66 bp, Synthetic construct
  source 1..66: mol_type = other DNA
ttcggatgtccgatatgtggggcagaatttactcagaaaggtaacctcctccgccacattaaactg

SEQ ID NO: 1421 - DNA, 66 bp, Synthetic construct
  source 1..66: mol_type = other DNA
ttcggctgtccccagtgtggggcatgttttactcagaaaggtaacctcctccgccacattaaactg

SEQ ID NO: 1422 - DNA, 66 bp, Synthetic construct
  source 1..66: mol_type = other DNA
ttcgcatgtgatatctgtggggcacagtttactcagaaaggtaacctcctccgccacattaaactg

SEQ ID NO: 1423 - DNA, 66 bp, Synthetic construct
  source 1..66: mol_type = other DNA
ttctggtgtaatatatgtggggcaagctttactcagaaaggtaacctcctccgccacattaaactg

SEQ ID NO: 1424 - DNA, 66 bp, Synthetic construct
  source 1..66: mol_type = other DNA
ttccactgtccaatttgtggggcaaaatttactcagaaaggtaacctcctccgccacattaaactg

SEQ ID NO: 1425 - DNA, 66 bp, Synthetic construct
  source 1..66: mol_type = other DNA
ttctattgtccagtgtgtggggcaatgtttactcagaaaggtaacctcctccgccacattaaactg

SEQ ID NO: 1426 - DNA, 66 bp, Synthetic construct
  source 1..66: mol_type = other DNA
ttcttctgtcctgtgtgtggggcaacttttactcagaaaggtaacctcctccgccacattaaactg

SEQ ID NO: 1427 - DNA, 66 bp, Synthetic construct
  source 1..66: mol_type = other DNA
ttctactgtgacgtctgtggggcagcgtttactcagaaaggtaacctcctccgccacattaaactg

SEQ ID NO: 1428 - DNA, 66 bp, Synthetic construct
  source 1..66: mol_type = other DNA
ttcttttgtgaaatttgtggggcattctttactcagaaaggtaacctcctccgccacattaaactg

SEQ ID NO: 1429 - DNA, 66 bp, Synthetic construct
  source 1..66: mol_type = other DNA
ttcttttgtcctatctgtggggcactatttactcagaaaggtaacctcctccgccacattaaactg

SEQ ID NO: 1430 - DNA, 66 bp, Synthetic construct
  source 1..66: mol_type = other DNA
ttctactgtcccgtctgtggggcaaaatttactcagaaaggtaacctcctccgccacattaaactg

SEQ ID NO: 1431 - DNA, 66 bp, Synthetic construct
  source 1..66: mol_type = other DNA
ttcaactgtccgatctgtggggcacattttactcagaaaggtaacctcctccgccacattaaactg

SEQ ID NO: 1432 - DNA, 66 bp, Synthetic construct
  source 1..66: mol_type = other DNA
ttgcactgccctatctgtggatttcaatgcactcagaaaggtaacctcctccgccacattaaactg

SEQ ID NO: 1433 - DNA, 66 bp, Synthetic construct
  source 1..66: mol_type = other DNA
cttgcttgccccatttgtggatttgagtgcactcagaaaggtaacctcctccgccacattaaactg

SEQ ID NO: 1434 - DNA, 66 bp, Synthetic construct
  source 1..66: mol_type = other DNA
ttctggtgtccagtctgtggggcacactttactcagaaaggtaacctcctccgccacattaaactg

SEQ ID NO: 1435 - DNA, 66 bp, Synthetic construct
  source 1..66: mol_type = other DNA
ctgtattgccctatttgcggtttcaagtgtactcagaaaggtaacctcctccgccacattaaactg

SEQ ID NO: 1436 - DNA, 66 bp, Synthetic construct; identical to SEQ ID NO: 112
  source 1..66: mol_type = other DNA

SEQ ID NO: 1437 - DNA, 66 bp, Synthetic construct
  source 1..66: mol_type = other DNA
ttctactgtgatgtctgtggggcaggttttactcagaaaggtaacctcctccgccacattaaactg

SEQ ID NO: 1438 - DNA, 66 bp, Synthetic construct; identical to SEQ ID NO: 466
  source 1..66: mol_type = other DNA

SEQ ID NO: 1439 - DNA, 66 bp, Synthetic construct; identical to SEQ ID NO: 746
  source 1..66: mol_type = other DNA

SEQ ID NO: 1440 - DNA, 66 bp, Synthetic construct; identical to SEQ ID NO: 374
  source 1..66: mol_type = other DNA

SEQ ID NO: 1441 - DNA, 66 bp, Synthetic construct
  source 1..66: mol_type = other DNA
ttcgcgtgtccagtttgtggggcaatatttactcagaaaggtaacctcctccgccacattaaactg

SEQ ID NO: 1442 - DNA, 66 bp, Synthetic construct
  source 1..66: mol_type = other DNA
ttcttctgtcccatttgtggggcaatgtttactcagaaaggtaacctcctccgccacattaaactg

SEQ ID NO: 1443 - DNA, 66 bp, Synthetic construct; identical to SEQ ID NO: 440
  source 1..66: mol_type = other DNA

SEQ ID NO: 1444 - DNA, 66 bp, Synthetic construct
  source 1..66: mol_type = other DNA
ttcttttgtgaggtgtgtggggcactgtttactcagaaaggtaacctcctccgccacattaaactg

SEQ ID NO: 1445 - DNA, 66 bp, Synthetic construct
  source 1..66: mol_type = other DNA
ttcctgtgtgagatctgtggggcagggtttactcagaaaggtaacctcctccgccacattaaactg

SEQ ID NO: 1446 - DNA, 66 bp, Synthetic construct
  source 1..66: mol_type = other DNA
ttcttctgtgacatttgtggggcatattttactcagaaaggtaacctcctccgccacattaaactg

SEQ ID NO: 1447 - DNA, 66 bp, Synthetic construct; identical to SEQ ID NO: 294
  source 1..66: mol_type = other DNA

SEQ ID NO: 1448 - DNA, 66 bp, Synthetic construct
  source 1..66: mol_type = other DNA
ttcttttgtcccgtgtgtggggcaatgtttactcagaaaggtaacctcctccgccacattaaactg

SEQ ID NO: 1449 - DNA, 66 bp, Synthetic construct
  source 1..66: mol_type = other DNA
ttctggtgcgagatctgtggccgcaagtttactcagaaaggtaacctcctccgccacattaaactg

SEQ ID NO: 1450 - DNA, 66 bp, Synthetic construct; identical to SEQ ID NO: 11
  source 1..66: mol_type = other DNA

SEQ ID NO: 1451 - DNA, 66 bp, Synthetic construct
  source 1..66: mol_type = other DNA
ttctggtgtgacatatgtggggcagggtttactcagaaaggtaacctcctccgccacattaaactg

SEQ ID NO: 1452 - DNA, 66 bp, Synthetic construct; identical to SEQ ID NO: 27
  source 1..66: mol_type = other DNA

SEQ ID NO: 1453 - DNA, 66 bp, Synthetic construct
  source 1..66: mol_type = other DNA
ttctggtgtccaatttgtggggcaatgtttactcagaaaggtaacctcctccgccacattaaactg

SEQ ID NO: 1454 - DNA, 66 bp, Synthetic construct
  source 1..66: mol_type = other DNA
ttcgcctgtgacatctgtggggcagggtttactcagaaaggtaacctcctccgccacattaaactg

SEQ ID NO: 1455 - DNA, 66 bp, Synthetic construct
  source 1..66: mol_type = other DNA
ttcatgtgtgaggtgtgtggggcaggatttactcagaaaggtaacctcctccgccacattaaactg

SEQ ID NO: 1456 - DNA, 66 bp, Synthetic construct; identical to SEQ ID NO: 606
  source 1..66: mol_type = other DNA

SEQ ID NO: 1457 - DNA, 66 bp, Synthetic construct
  source 1..66: mol_type = other DNA
ttctcttgtgatatctgtggggcacgatttactcagaaaggtaacctcctccgccacattaaactg

SEQ ID NO: 1458 - DNA, 66 bp, Synthetic construct
  source 1..66: mol_type = other DNA
ttcaattgtgagatttgtggggcaaaatttactcagaaaggtaacctcctccgccacattaaactg

SEQ ID NO: 1459 - DNA, 66 bp, Synthetic construct
  source 1..66: mol_type = other DNA
ttctattgtccggtgtgtggggcattgtttactcagaaaggtaacctcctccgccacattaaactg

SEQ ID NO: 1460 - DNA, 66 bp, Synthetic construct
  source 1..66: mol_type = other DNA
ttcttttgcgagatatgtggtaggccattcactcagaaaggtaacctcctccgccacattaaactg

SEQ ID NO: 1461 - DNA, 66 bp, Synthetic construct; identical to SEQ ID NO: 447
  source 1..66: mol_type = other DNA

SEQ ID NO: 1462 - DNA, 66 bp, Synthetic construct
  source 1..66: mol_type = other DNA
ttcggctgtccaatttgcggccgctttttcactcagaaaggtaacctcctccgccacattaaactg

SEQ ID NO: 1463 - DNA, 66 bp, Synthetic construct
  source 1..66: mol_type = other DNA
ttgcattgcgagatttgtggatttgcctgcactcagaaaggtaacctcctccgccacattaaactg

SEQ ID NO: 1464 - DNA, 66 bp, Synthetic construct
  source 1..66: mol_type = other DNA
ttcttctgtcctgtctgtggggcaaactttactcagaaaggtaacctcctccgccacattaaactg

SEQ ID NO: 1465 - DNA, 66 bp, Synthetic construct
  source 1..66: mol_type = other DNA
ttcggttgtgaagtctgtggggcaatttttactcagaaaggtaacctcctccgccacattaaactg

SEQ ID NO: 1466 - DNA, 66 bp, Synthetic construct; identical to SEQ ID NO: 255
  source 1..66: mol_type = other DNA

SEQ ID NO: 1467 - DNA, 66 bp, Synthetic construct
  source 1..66: mol_type = other DNA
ttcttttgtgacgtatgtggggcatgctttactcagaaaggtaacctcctccgccacattaaactg

SEQ ID NO: 1468 - DNA, 66 bp, Synthetic construct
  source 1..66: mol_type = other DNA
ttcgcgtgtgaaatttgtggggcagaatttactcagaaaggtaacctcctccgccacattaaactg

SEQ ID NO: 1469 - DNA, 66 bp, Synthetic construct; identical to SEQ ID NO: 684
  source 1..66: mol_type = other DNA

SEQ ID NO: 1470 - DNA, 66 bp, Synthetic construct
  source 1..66: mol_type = other DNA
ttcgcttgtgacgtatgtggggcatcctttactcagaaaggtaacctcctccgccacattaaactg

SEQ ID NO: 1471 - DNA, 66 bp, Synthetic construct; identical to SEQ ID NO: 510
  source 1..66: mol_type = other DNA

SEQ ID NO: 1472 - DNA, 66 bp, Synthetic construct
  source 1..66: mol_type = other DNA
ttctcatgtaatatctgtggggcaccatttactcagaaaggtaacctcctccgccacattaaactg

SEQ ID NO: 1473 - DNA, 66 bp, Synthetic construct
  source 1..66: mol_type = other DNA
ttcgcgtgtaatatctgtggggcaaagtttactcagaaaggtaacctcctccgccacattaaactg

SEQ ID NO: 1474 - DNA, 66 bp, Synthetic construct
  source 1..66: mol_type = other DNA
ttctggtgtcctgtttgtggggcatactttactcagaaaggtaacctcctccgccacattaaactg

SEQ ID NO: 1475 - DNA, 66 bp, Synthetic construct; identical to SEQ ID NO: 76
  source 1..66: mol_type = other DNA

SEQ ID NO: 1476 - DNA, 66 bp, Synthetic construct
  source 1..66: mol_type = other DNA
ttctattgtgatatttgtggggcacattttactcagaaaggtaacctcctccgccacattaaactg

SEQ ID NO: 1477 - DNA, 66 bp, Synthetic construct
  source 1..66: mol_type = other DNA
ctgttctgccccatctgcggattcttttgtactcagaaaggtaacctcctccgccacattaaactg

SEQ ID NO: 1478 - DNA, 66 bp, Synthetic construct
  source 1..66: mol_type = other DNA
ttctactgtcccgtgtgtggggcaaggtttactcagaaaggtaacctcctccgccacattaaactg

SEQ ID NO: 1479 - DNA, 66 bp, Synthetic construct
  source 1..66: mol_type = other DNA
ttctcgtgtgacatctgtggggcaagctttactcagaaaggtaacctcctccgccacattaaactg

SEQ ID NO: 1480 - DNA, 66 bp, Synthetic construct; identical to SEQ ID NO: 16
  source 1..66: mol_type = other DNA

SEQ ID NO: 1481 - DNA, 66 bp, Synthetic construct; identical to SEQ ID NO: 128
  source 1..66: mol_type = other DNA

SEQ ID NO: 1482 - DNA, 66 bp, Synthetic construct
  source 1..66: mol_type = other DNA
ttcttctgtgaggtatgtggggcaatatttactcagaaaggtaacctcctccgccacattaaactg

SEQ ID NO: 1483 - DNA, 66 bp, Synthetic construct
  source 1..66: mol_type = other DNA
ttctggtgtgacatttgtggggcaatctttactcagaaaggtaacctcctccgccacattaaactg

SEQ ID NO: 1484 - DNA, 66 bp, Synthetic construct; identical to SEQ ID NO: 218
  source 1..66: mol_type = other DNA

SEQ ID NO: 1485 - DNA, 66 bp, Synthetic construct; identical to SEQ ID NO: 336
  source 1..66: mol_type = other DNA

SEQ ID NO: 1486 - DNA, 66 bp, Synthetic construct
  source 1..66: mol_type = other DNA
tttggttgtccaatctgtggaagacgcttcactcagaaaggtaacctcctccgccacattaaactg

SEQ ID NO: 1487 - DNA, 66 bp, Synthetic construct
  source 1..66: mol_type = other DNA
ttcggttgccccatttgtggtcgatacttcactcagaaaggtaacctcctccgccacattaaactg

SEQ ID NO: 1488 - DNA, 66 bp, Synthetic construct
  source 1..66: mol_type = other DNA
ttgtggtgtgaaatctgcggcttcatttgcactcagaaaggtaacctcctccgccacattaaactg

SEQ ID NO: 1489 - DNA, 66 bp, Synthetic construct; identical to SEQ ID NO: 244
  source 1..66: mol_type = other DNA

SEQ ID NO: 1490 - DNA, 66 bp, Synthetic construct; identical to SEQ ID NO: 67
  source 1..66: mol_type = other DNA

SEQ ID NO: 1491 - DNA, 66 bp, Synthetic construct
  source 1..66: mol_type = other DNA
ttctactgtgacgtttgtggggcatgttttactcagaaaggtaacctcctccgccacattaaactg

SEQ ID NO: 1492 - DNA, 66 bp, Synthetic construct
  source 1..66: mol_type = other DNA
ttcaactgtgagatttgtggggcaaggtttactcagaaaggtaacctcctccgccacattaaactg

SEQ ID NO: 1493 - DNA, 66 bp, Synthetic construct
  source 1..66: mol_type = other DNA
ttccattgtccagtttgtggggcatcatttactcagaaaggtaacctcctccgccacattaaactg

SEQ ID NO: 1494 - DNA, 66 bp, Synthetic construct
  source 1..66: mol_type = other DNA
ttcggctgtgagatttgtggggcattctttactcagaaaggtaacctcctccgccacattaaactg

SEQ ID NO: 1495 - DNA, 66 bp, Synthetic construct
  source 1..66: mol_type = other DNA
ttcaattgtgaggtgtgtggggcacagtttactcagaaaggtaacctcctccgccacattaaactg

SEQ ID NO: 1496 - DNA, 66 bp, Synthetic construct
  source 1..66: mol_type = other DNA
ttcaactgtcctatctgtggggcacagtttactcagaaaggtaacctcctccgccacattaaactg

SEQ ID NO: 1497 - DNA, 66 bp, Synthetic construct; identical to SEQ ID NO: 389
  source 1..66: mol_type = other DNA

SEQ ID NO: 1498 - DNA, 66 bp, Synthetic construct
  source 1..66: mol_type = other DNA
ttctggtgtcctatttgtggggcagagtttactcagaaaggtaacctcctccgccacattaaactg

SEQ ID NO: 1499 - DNA, 66 bp, Synthetic construct
  source 1..66: mol_type = other DNA
ttctgctgtgacatttgtggggcagggtttactcagaaaggtaacctcctccgccacattaaactg

SEQ ID NO: 1500 - DNA, 66 bp, Synthetic construct
  source 1..66: mol_type = other DNA
ttctattgtgatatctgtggggcactatttactcagaaaggtaacctcctccgccacattaaactg

SEQ ID NO: 1501 - DNA, 66 bp, Synthetic construct
  source 1..66: mol_type = other DNA
ttctcctgtgagatatgtggggcacactttactcagaaaggtaacctcctccgccacattaaactg

SEQ ID NO: 1502 - DNA, 66 bp, Synthetic construct
  source 1..66: mol_type = other DNA
ttctcatgtccgatttgtggggcaaattttactcagaaaggtaacctcctccgccacattaaactg

SEQ ID NO: 1503 - DNA, 66 bp, Synthetic construct; identical to SEQ ID NO: 242
  source 1..66: mol_type = other DNA

SEQ ID NO: 1504 - DNA, 66 bp, Synthetic construct; identical to SEQ ID NO: 148
  source 1..66: mol_type = other DNA

SEQ ID NO: 1505 - DNA, 66 bp, Synthetic construct
  source 1..66: mol_type = other DNA
ttccactgtccgatctgtggggcacagtttactcagaaaggtaacctcctccgccacattaaactg

SEQ ID NO: 1506 - DNA, 66 bp, Synthetic construct
  source 1..66: mol_type = other DNA
ttctcctgtgaaatctgtggggcatactttactcagaaaggtaacctcctccgccacattaaactg

SEQ ID NO: 1507 - DNA, 66 bp, Synthetic construct
  source 1..66: mol_type = other DNA
ttctattgtgatatctgtggggcaatgtttactcagaaaggtaacctcctccgccacattaaactg

SEQ ID NO: 1508 - DNA, 66 bp, Synthetic construct
  source 1..66: mol_type = other DNA
ttcttctgcccaatctgcggacgcccatttactcagaaaggtaacctcctccgccacattaaactg

SEQ ID NO: 1509 - DNA, 66 bp, Synthetic construct
  source 1..66: mol_type = other DNA
ttctgttgtccagtttgtggggcaaagtttactcagaaaggtaacctcctccgccacattaaactg

SEQ ID NO: 1510 - DNA, 66 bp, Synthetic construct; identical to SEQ ID NO: 161
  source 1..66: mol_type = other DNA

SEQ ID NO: 1511 - DNA, 66 bp, Synthetic construct
  source 1..66: mol_type = other DNA
ttctattgtaacatctgtggggcatcctttactcagaaaggtaacctcctccgccacattaaactg

SEQ ID NO: 1512 - DNA, 66 bp, Synthetic construct; identical to SEQ ID NO: 156
  source 1..66: mol_type = other DNA

SEQ ID NO: 1513 - DNA, 66 bp, Synthetic construct
  source 1..66: mol_type = other DNA
ttattctgcgaaatctgcggtttttattgcactcagaaaggtaacctcctccgccacattaaactg

SEQ ID NO: 1514 - DNA, 66 bp, Synthetic construct
  source 1..66: mol_type = other DNA
ttctggtgtgaggtgtgtggggcattctttactcagaaaggtaacctcctccgccacattaaactg

SEQ ID NO: 1515 - DNA, 66 bp, Synthetic construct
  source 1..66: mol_type = other DNA
ttcgcatgtcctgtgtgtggggcagactttactcagaaaggtaacctcctccgccacattaaactg

SEQ ID NO: 1516 - DNA, 66 bp, Synthetic construct
  source 1..66: mol_type = other DNA
ttcgcttgtgatatttgtggggcaatgtttactcagaaaggtaacctcctccgccacattaaactg

SEQ ID NO: 1517 - DNA, 66 bp, Synthetic construct
  source 1..66: mol_type = other DNA
ttcgggtgtgatatatgtggggcaaagtttactcagaaaggtaacctcctccgccacattaaactg

SEQ ID NO: 1518 - DNA, 66 bp, Synthetic construct
  source 1..66: mol_type = other DNA
ttcggctgtccacagtgtggggcacgatttactcagaaaggtaacctcctccgccacattaaactg

SEQ ID NO: 1519 - DNA, 66 bp, Synthetic construct
  source 1..66: mol_type = other DNA
ctgtggtgtcccatttgcgggttcaattgtactcagaaaggtaacctcctccgccacattaaactg

SEQ ID NO: 1520 - DNA, 66 bp, Synthetic construct
  source 1..66: mol_type = other DNA
ttctggtgtgacatatgtggggcagtgtttactcagaaaggtaacctcctccgccacattaaactg

SEQ ID NO: 1521 - DNA, 66 bp, Synthetic construct
  source 1..66: mol_type = other DNA
ttctggtgtgatatctgtggggcattatttactcagaaaggtaacctcctccgccacattaaactg

SEQ ID NO: 1522 - DNA, 66 bp, Synthetic construct
  source 1..66: mol_type = other DNA
ttcagttgtgaggtatgtggggcaatgtttactcagaaaggtaacctcctccgccacattaaactg

SEQ ID NO: 1523 - DNA, 66 bp, Synthetic construct
  source 1..66: mol_type = other DNA
ttctgctgtgagatctgtggggcaaattttactcagaaaggtaacctcctccgccacattaaactg

SEQ ID NO: 1524 - DNA, 66 bp, Synthetic construct
  source 1..66: mol_type = other DNA
ttcaactgtgaaatatgtggggcaaattttactcagaaaggtaacctcctccgccacattaaactg

SEQ ID NO: 1525 - DNA, 66 bp, Synthetic construct
  source 1..66: mol_type = other DNA
ttatactgccccatctgcggattcccttgtactcagaaaggtaacctcctccgccacattaaactg

SEQ ID NO: 1526 - DNA, 66 bp, Synthetic construct
  source 1..66: mol_type = other DNA
ttcagttgtcccgtgtgtggggcacattttactcagaaaggtaacctcctccgccacattaaactg

SEQ ID NO: 1527 - DNA, 66 bp, Synthetic construct
  source 1..66: mol_type = other DNA
ttctggtgtgatatttgtggggcattctttactcagaaaggtaacctcctccgccacattaaactg

SEQ ID NO: 1528 - DNA, 66 bp, Synthetic construct
  source 1..66: mol_type = other DNA
ttccactgtcctgtatgtggggcatgttttactcagaaaggtaacctcctccgccacattaaactg

SEQ ID NO: 1529 - DNA, 66 bp, Synthetic construct; identical to SEQ ID NO: 51
  source 1..66: mol_type = other DNA

SEQ ID NO: 1530 - DNA, 66 bp, Synthetic construct
  source 1..66: mol_type = other DNA
ttctactgtgacgtgtgtggggcacagtttactcagaaaggtaacctcctccgccacattaaactg

SEQ ID NO: 1531 - DNA, 66 bp, Synthetic construct
  source 1..66: mol_type = other DNA
tttggatgcccgatctgtggccgcgctttcactcagaaaggtaacctcctccgccacattaaactg

SEQ ID NO: 1532 - DNA, 66 bp, Synthetic construct
  source 1..66: mol_type = other DNA
ttctggtgtgaacagtgtggggcaaagtttactcagaaaggtaacctcctccgccacattaaactg

SEQ ID NO: 1533 - DNA, 66 bp, Synthetic construct
  source 1..66: mol_type = other DNA
tttgcatgcccaatctgcggccggccttttactcagaaaggtaacctcctccgccacattaaactg

SEQ ID NO: 1534 - DNA, 66 bp, Synthetic construct; identical to SEQ ID NO: 77
  source 1..66: mol_type = other DNA

SEQ ID NO: 1535 - DNA, 66 bp, Synthetic construct
  source 1..66: mol_type = other DNA
ttcgcatgtgaagtgtgtggggcatactttactcagaaaggtaacctcctccgccacattaaactg

SEQ ID NO: 1536 - DNA, 66 bp, Synthetic construct
  source 1..66: mol_type = other DNA
ctaagctgcgagatttgcgggtttcagtgcactcagaaaggtaacctcctccgccacattaaactg

SEQ ID NO: 1537 - DNA, 66 bp, Synthetic construct
  source 1..66: mol_type = other DNA
ttatcttgtccaatttgcggtttcgggtgtactcagaaaggtaacctcctccgccacattaaactg

SEQ ID NO: 1538 - DNA, 66 bp, Synthetic construct
  source 1..66: mol_type = other DNA
ttccactgtcctatttgtggggcagagtttactcagaaaggtaacctcctccgccacattaaactg

SEQ ID NO: 1539 - DNA, 66 bp, Synthetic construct
  source 1..66: mol_type = other DNA
ttccactgtgaggtttgtggggcacgctttactcagaaaggtaacctcctccgccacattaaactg

SEQ ID NO: 1540 - DNA, 66 bp, Synthetic construct; identical to SEQ ID NO: 630
  source 1..66: mol_type = other DNA

SEQ ID NO: 1541 - DNA, 66 bp, Synthetic construct
  source 1..66: mol_type = other DNA
ttacactgcgagatttgtggcttccaatgcactcagaaaggtaacctcctccgccacattaaactg

SEQ ID NO: 1542 - DNA, 66 bp, Synthetic construct
  source 1..66: mol_type = other DNA
ttcgattgtccggtctgtggggcaccttttactcagaaaggtaacctcctccgccacattaaactg

SEQ ID NO: 1543 - DNA, 66 bp, Synthetic construct; identical to SEQ ID NO: 118
  source 1..66: mol_type = other DNA

SEQ ID NO: 1544 - DNA, 66 bp, Synthetic construct; identical to SEQ ID NO: 248
  source 1..66: mol_type = other DNA

SEQ ID NO: 1545 - DNA, 66 bp, Synthetic construct; identical to SEQ ID NO: 563
  source 1..66: mol_type = other DNA

SEQ ID NO: 1546 - DNA, 66 bp, Synthetic construct
  source 1..66: mol_type = other DNA
ttcacatgtgatatctgtggggcagcctttactcagaaaggtaacctcctccgccacattaaactg

SEQ ID NO: 1547 - DNA, 66 bp, Synthetic construct
  source 1..66: mol_type = other DNA
ttctgctgtcctatttgtggggcacaatttactcagaaaggtaacctcctccgccacattaaactg

SEQ ID NO: 1548 - DNA, 66 bp, Synthetic construct
  source 1..66: mol_type = other DNA
ttctggtgtccaatctgtggggcattctttactcagaaaggtaacctcctccgccacattaaactg

SEQ ID NO: 1549 - DNA, 66 bp, Synthetic construct; identical to SEQ ID NO: 26
  source 1..66: mol_type = other DNA

SEQ ID NO: 1550 - DNA, 66 bp, Synthetic construct
  source 1..66: mol_type = other DNA
ctggcttgcccaatctgcggctttgtgtgtactcagaaaggtaacctcctccgccacattaaactg

SEQ ID NO: 1551 - DNA, 66 bp, Synthetic construct
  source 1..66: mol_type = other DNA
ttctattgtccgatctgtggggcaagatttactcagaaaggtaacctcctccgccacattaaactg

SEQ ID NO: 1552 - DNA, 66 bp, Synthetic construct; identical to SEQ ID NO: 678
  source 1..66: mol_type = other DNA

SEQ ID NO: 1553 - DNA, 66 bp, Synthetic construct
  source 1..66: mol_type = other DNA
ttccactgtgagatatgtggggcaatgtttactcagaaaggtaacctcctccgccacattaaactg

SEQ ID NO: 1554 - DNA, 66 bp, Synthetic construct; identical to SEQ ID NO: 721
  source 1..66: mol_type = other DNA

SEQ ID NO: 1555 - DNA, 66 bp, Synthetic construct
  source 1..66: mol_type = other DNA
ttccactgtcctatttgtggggcacgttttactcagaaaggtaacctcctccgccacattaaactg

SEQ ID NO: 1556 - DNA, 66 bp, Synthetic construct; identical to SEQ ID NO: 587
  source 1..66: mol_type = other DNA

SEQ ID NO: 1557 - DNA, 66 bp, Synthetic construct
  source 1..66: mol_type = other DNA
ctctggtgcgaaatatgtggttttttttgtactcagaaaggtaacctcctccgccacattaaactg

SEQ ID NO: 1558 - DNA, 66 bp, Synthetic construct
  source 1..66: mol_type = other DNA
ttctggtgtgaagtgtgtggggcagagtttactcagaaaggtaacctcctccgccacattaaactg

SEQ ID NO: 1559 - DNA, 66 bp, Synthetic construct
  source 1..66: mol_type = other DNA
ttctcctgtccgatatgtggggcacagtttactcagaaaggtaacctcctccgccacattaaactg

SEQ ID NO: 1560 - DNA, 66 bp, Synthetic construct
  source 1..66: mol_type = other DNA
ttcttctgtaatatttgtggggcatgctttactcagaaaggtaacctcctccgccacattaaactg

SEQ ID NO: 1561 - DNA, 66 bp, Synthetic construct
  source 1..66: mol_type = other DNA
ttcttttgtgacatttgtggggcacattttactcagaaaggtaacctcctccgccacattaaactg

SEQ ID NO: 1562 - DNA, 66 bp, Synthetic construct
  source 1..66: mol_type = other DNA
ttccactgtgatgtctgtggggcaccatttactcagaaaggtaacctcctccgccacattaaactg

SEQ ID NO: 1563 - DNA, 66 bp, Synthetic construct
  source 1..66: mol_type = other DNA
ttcaattgtgatatctgtggggcagcatttactcagaaaggtaacctcctccgccacattaaactg

SEQ ID NO: 1564 - DNA, 66 bp, Synthetic construct; identical to SEQ ID NO: 395
  source 1..66: mol_type = other DNA

SEQ ID NO: 1565 - DNA, 66 bp, Synthetic construct; identical to SEQ ID NO: 190
  source 1..66: mol_type = other DNA

SEQ ID NO: 1566 - DNA, 66 bp, Synthetic construct
  source 1..66: mol_type = other DNA
ttcagctgtgatatttgtggggcaccgtttactcagaaaggtaacctcctccgccacattaaactg

SEQ ID NO: 1567 - DNA, 66 bp, Synthetic construct; identical to SEQ ID NO: 598
  source 1..66: mol_type = other DNA

SEQ ID NO: 1568 - DNA, 66 bp, Synthetic construct; identical to SEQ ID NO: 21
  source 1..66: mol_type = other DNA

SEQ ID NO: 1569 - DNA, 66 bp, Synthetic construct
  source 1..66: mol_type = other DNA
ttccattgtccagtgtgtggggcaaagtttactcagaaaggtaacctcctccgccacattaaactg

SEQ ID NO: 1570 - DNA, 66 bp, Synthetic construct; identical to SEQ ID NO: 620
  source 1..66: mol_type = other DNA

SEQ ID NO: 1571 - DNA, 66 bp, Synthetic construct
  source 1..66: mol_type = other DNA
ttcttttgtgatgtgtgtggggcatcctttactcagaaaggtaacctcctccgccacattaaactg

SEQ ID NO: 1572 - DNA, 66 bp, Synthetic construct; identical to SEQ ID NO: 45
  source 1..66: mol_type = other DNA

SEQ ID NO: 1573 - DNA, 66 bp, Synthetic construct
  source 1..66: mol_type = other DNA
ttcagttgtccaatctgtggggcacactttactcagaaaggtaacctcctccgccacattaaactg

SEQ ID NO: 1574 - DNA, 66 bp, Synthetic construct
  source 1..66: mol_type = other DNA
ttcaactgtccaatctgtggggcatgctttactcagaaaggtaacctcctccgccacattaaactg

SEQ ID NO: 1575 - DNA, 66 bp, Synthetic construct
  source 1..66: mol_type = other DNA
ttcagctgtgatatttgtggggcagcctttactcagaaaggtaacctcctccgccacattaaactg

SEQ ID NO: 1576 - DNA, 66 bp, Synthetic construct
  source 1..66: mol_type = other DNA
ttcttttgtcccgtctgtggggcagtctttactcagaaaggtaacctcctccgccacattaaactg

SEQ ID NO: 1577 - DNA, 66 bp, Synthetic construct
  source 1..66: mol_type = other DNA
ttcttttgtgatatctgtggggcaaattttactcagaaaggtaacctcctccgccacattaaactg

SEQ ID NO: 1578 - DNA, 66 bp, Synthetic construct
  source 1..66: mol_type = other DNA
ttctgttgtgatatctgtggggcacgctttactcagaaaggtaacctcctccgccacattaaactg

SEQ ID NO: 1579 - DNA, 66 bp, Synthetic construct
  source 1..66: mol_type = other DNA
ttcttctgtaatatttgtggggcagggtttactcagaaaggtaacctcctccgccacattaaactg

SEQ ID NO: 1580 - DNA, 66 bp, Synthetic construct
  source 1..66: mol_type = other DNA
ttctggtgtgacatatgtggggcacactttactcagaaaggtaacctcctccgccacattaaactg

SEQ ID NO: 1581 - DNA, 66 bp, Synthetic construct
  source 1..66: mol_type = other DNA
ttcgactgtcctatatgtggggcaggctttactcagaaaggtaacctcctccgccacattaaactg

SEQ ID NO: 1582 - DNA, 66 bp, Synthetic construct; identical to SEQ ID NO: 266
  source 1..66: mol_type = other DNA

SEQ ID NO: 1583 - DNA, 66 bp, Synthetic construct
  source 1..66: mol_type = other DNA
cttcattgcccaatttgcggattccactgtactcagaaaggtaacctcctccgccacattaaactg

SEQ ID NO: 1584 - DNA, 66 bp, Synthetic construct
  source 1..66: mol_type = other DNA
ttcagttgtcctatttgtggggcaaaatttactcagaaaggtaacctcctccgccacattaaactg

SEQ ID NO: 1585 - DNA, 66 bp, Synthetic construct
  source 1..66: mol_type = other DNA
ttcaaatgtgaggtttgtggggcaggctttactcagaaaggtaacctcctccgccacattaaactg

SEQ ID NO: 1586 - DNA, 66 bp, Synthetic construct
  source 1..66: mol_type = other DNA
ttctgttgtgacatctgtggggcatcttttactcagaaaggtaacctcctccgccacattaaactg

SEQ ID NO: 1587 - DNA, 66 bp, Synthetic construct
  source 1..66: mol_type = other DNA
ttctcgtgtgagatctgtggggcaatgtttactcagaaaggtaacctcctccgccacattaaactg

SEQ ID NO: 1588 - DNA, 66 bp, Synthetic construct
  source 1..66: mol_type = other DNA
ttcagatgtcctgtctgtggggcaggctttactcagaaaggtaacctcctccgccacattaaactg

SEQ ID NO: 1589 - DNA, 66 bp, Synthetic construct; identical to SEQ ID NO: 604
  source 1..66: mol_type = other DNA

SEQ ID NO: 1590 - DNA, 66 bp, Synthetic construct
  source 1..66: mol_type = other DNA
ctgttttgtcccatttgcgggttcaattgcactcagaaaggtaacctcctccgccacattaaactg

SEQ ID NO: 1591 - DNA, 66 bp, Synthetic construct; identical to SEQ ID NO: 566
  source 1..66: mol_type = other DNA

SEQ ID NO: 1592 - DNA, 66 bp, Synthetic construct
  source 1..66: mol_type = other DNA
ctctcatgcccaatttgtggattccagtgcactcagaaaggtaacctcctccgccacattaaactg

SEQ ID NO: 1593 - DNA, 66 bp, Synthetic construct
  source 1..66: mol_type = other DNA
ttcgcatgtgaacagtgtggggcaagatttactcagaaaggtaacctcctccgccacattaaactg

SEQ ID NO: 1594 - DNA, 66 bp, Synthetic construct; identical to SEQ ID NO: 102
  source 1..66: mol_type = other DNA

SEQ ID NO: 1595 - DNA, 66 bp, Synthetic construct
  source 1..66: mol_type = other DNA
ttctactgtgatatctgtggggcatactttactcagaaaggtaacctcctccgccacattaaactg

SEQ ID NO: 1596 - DNA, 66 bp, Synthetic construct
  source 1..66: mol_type = other DNA
ttccactgtccaatctgtggggcatattttactcagaaaggtaacctcctccgccacattaaactg

SEQ ID NO: 1597 - DNA, 66 bp, Synthetic construct
  source 1..66: mol_type = other DNA
ctgaactgtccaatctgtggattcgcctgtactcagaaaggtaacctcctccgccacattaaactg

SEQ ID NO: 1598 - DNA, 66 bp, Synthetic construct; identical to SEQ ID NO: 229
  source 1..66: mol_type = other DNA

SEQ ID NO: 1599 - DNA, 66 bp, Synthetic construct
  source 1..66: mol_type = other DNA
ttcttttgtcccatctgtggggcaatctttactcagaaaggtaacctcctccgccacattaaactg

SEQ ID NO: 1600 - DNA, 66 bp, Synthetic construct
  source 1..66: mol_type = other DNA
ttctggtgtaacatttgtggggcagcttttactcagaaaggtaacctcctccgccacattaaactg

SEQ ID NO: 1601 - DNA, 66 bp, Synthetic construct
  source 1..66: mol_type = other DNA
ttcgcttgtaatatttgtggggcatcctttactcagaaaggtaacctcctccgccacattaaactg

SEQ ID NO: 1602 - DNA, 66 bp, Synthetic construct
  source 1..66: mol_type = other DNA
ttcctttgtgaagtgtgtggggcaggctttactcagaaaggtaacctcctccgccacattaaactg

SEQ ID NO: 1603 - DNA, 66 bp, Synthetic construct
  source 1..66: mol_type = other DNA
ctggggtgtgagatctgcgggttcacttgcactcagaaaggtaacctcctccgccacattaaactg

SEQ ID NO: 1604 - DNA, 66 bp, Synthetic construct
  source 1..66: mol_type = other DNA
ttcggttgcccaatttgtgggcggagcttcactcagaaaggtaacctcctccgccacattaaactg

SEQ ID NO: 1605 - DNA, 66 bp, Synthetic construct
  source 1..66: mol_type = other DNA
ttctgctgtgagatttgtggggcaatgtttactcagaaaggtaacctcctccgccacattaaactg

SEQ ID NO: 1606 - DNA, 66 bp, Synthetic construct
  source 1..66: mol_type = other DNA
ttgcattgtcccatctgtggtttccgttgtactcagaaaggtaacctcctccgccacattaaactg

SEQ ID NO: 1607 - DNA, 66 bp, Synthetic construct
  source 1..66: mol_type = other DNA
ttcttctgtgatatctgtggggcactttttactcagaaaggtaacctcctccgccacattaaactg

SEQ ID NO: 1608 - DNA, 66 bp, Synthetic construct; identical to SEQ ID NO: 641
  source 1..66: mol_type = other DNA

SEQ ID NO: 1609 - DNA, 66 bp, Synthetic construct
  source 1..66: mol_type = other DNA
ttctggtgtaatatctgtggggcaaactttactcagaaaggtaacctcctccgccacattaaactg

SEQ ID NO: 1610 - DNA, 66 bp, Synthetic construct; identical to SEQ ID NO: 187
  source 1..66: mol_type = other DNA

SEQ ID NO: 1611 - DNA, 66 bp, Synthetic construct
  source 1..66: mol_type = other DNA
ctttggtgtcctatatgcggctttatttgcactcagaaaggtaacctcctccgccacattaaactg

SEQ ID NO: 1612 - DNA, 66 bp, Synthetic construct
  source 1..66: mol_type = other DNA
tttttttgcgagatctgtggtcggaagtttactcagaaaggtaacctcctccgccacattaaactg

SEQ ID NO: 1613 - DNA, 66 bp, Synthetic construct; identical to SEQ ID NO: 228
  source 1..66: mol_type = other DNA

SEQ ID NO: 1614 - DNA, 66 bp, Synthetic construct
  source 1..66: mol_type = other DNA
ctggggtgtcccatatgtggattcctttgcactcagaaaggtaacctcctccgccacattaaactg

SEQ ID NO: 1615 - DNA, 66 bp, Synthetic construct; identical to SEQ ID NO: 95
  source 1..66: mol_type = other DNA

SEQ ID NO: 1616 - DNA, 66 bp, Synthetic construct
  source 1..66: mol_type = other DNA
ttcgcctgtgaagtgtgtggggcagagtttactcagaaaggtaacctcctccgccacattaaactg

SEQ ID NO: 1617 - DNA, 66 bp, Synthetic construct
  source 1..66: mol_type = other DNA
ctgtcatgcgagatctgcggcttcaaatgtactcagaaaggtaacctcctccgccacattaaactg

SEQ ID NO: 1618 - DNA, 66 bp, Synthetic construct
  source 1..66: mol_type = other DNA
ctgttttgtgaaatctgtggctttttctgcactcagaaaggtaacctcctccgccacattaaactg

SEQ ID NO: 1619 - DNA, 66 bp, Synthetic construct; identical to SEQ ID NO: 633
  source 1..66: mol_type = other DNA

SEQ ID NO: 1620 - DNA, 66 bp, Synthetic construct; identical to SEQ ID NO: 338
  source 1..66: mol_type = other DNA

SEQ ID NO: 1621 - DNA, 66 bp, Synthetic construct
  source 1..66: mol_type = other DNA
ttctcctgtgaagtgtgtggggcaaattttactcagaaaggtaacctcctccgccacattaaactg

SEQ ID NO: 1622 - DNA, 66 bp, Synthetic construct; identical to SEQ ID NO: 48
  source 1..66: mol_type = other DNA

SEQ ID NO: 1623 - DNA, 66 bp, Synthetic construct
  source 1..66: mol_type = other DNA
ttctggtgtccgatttgtggggcagtctttactcagaaaggtaacctcctccgccacattaaactg

SEQ ID NO: 1624 - DNA, 66 bp, Synthetic construct
  source 1..66: mol_type = other DNA
ttctcgtgtcctgtttgtggggcacagtttactcagaaaggtaacctcctccgccacattaaactg

SEQ ID NO: 1625 - DNA, 66 bp, Synthetic construct; identical to SEQ ID NO: 441
  source 1..66: mol_type = other DNA

SEQ ID NO: 1626 - DNA, 66 bp, Synthetic construct; identical to SEQ ID NO: 366
  source 1..66: mol_type = other DNA

SEQ ID NO: 1627 - DNA, 66 bp, Synthetic construct
  source 1..66: mol_type = other DNA
ttctattgtaatatctgtggggcacagtttactcagaaaggtaacctcctccgccacattaaactg

SEQ ID NO: 1628 - DNA, 66 bp, Synthetic construct
  source 1..66: mol_type = other DNA
ctcaattgcccaatctgtggttttacttgtactcagaaaggtaacctcctccgccacattaaactg

SEQ ID NO: 1629 - DNA, 66 bp, Synthetic construct
  source 1..66: mol_type = other DNA
ttctggtgtgacatctgtggggcatactttactcagaaaggtaacctcctccgccacattaaactg

SEQ ID NO: 1630 - DNA, 66 bp, Synthetic construct
  source 1..66: mol_type = other DNA
ttctcctgtccgatctgtggggcatattttactcagaaaggtaacctcctccgccacattaaactg

SEQ ID NO: 1631 - DNA, 66 bp, Synthetic construct; identical to SEQ ID NO: 237
  source 1..66: mol_type = other DNA

SEQ ID NO: 1632 - DNA, 66 bp, Synthetic construct
  source 1..66: mol_type = other DNA
ttgtggtgcgagatctgcggcttctattgcactcagaaaggtaacctcctccgccacattaaactg

SEQ ID NO: 1633 - DNA, 66 bp, Synthetic construct
  source 1..66: mol_type = other DNA
ttctggtgtcctgtttgtggggcattttttactcagaaaggtaacctcctccgccacattaaactg

SEQ ID NO: 1634 - DNA, 66 bp, Synthetic construct
  source 1..66: mol_type = other DNA
ctgtactgccctatttgtggattttggtgcactcagaaaggtaacctcctccgccacattaaactg

SEQ ID NO: 1635 - DNA, 66 bp, Synthetic construct
  source 1..66: mol_type = other DNA
ttctggtgtccagtctgtggggcagaatttactcagaaaggtaacctcctccgccacattaaactg

SEQ ID NO: 1636 - DNA, 66 bp, Synthetic construct
  source 1..66: mol_type = other DNA
ttctactgtgacatctgtggggcattttttactcagaaaggtaacctcctccgccacattaaactg

SEQ ID NO: 1637 - DNA, 66 bp, Synthetic construct; identical to SEQ ID NO: 591
  source 1..66: mol_type = other DNA

SEQ ID NO: 1638 - DNA, 66 bp, Synthetic construct; identical to SEQ ID NO: 207
  source 1..66: mol_type = other DNA

SEQ ID NO: 1639 - DNA, 66 bp, Synthetic construct
  source 1..66: mol_type = other DNA
ttagcctgtccaatctgtggctttaactgcactcagaaaggtaacctcctccgccacattaaactg

SEQ ID NO: 1640 - DNA, 66 bp, Synthetic construct
  source 1..66: mol_type = other DNA
ttcagatgtcccatttgtggggcaggctttactcagaaaggtaacctcctccgccacattaaactg

SEQ ID NO: 1641 - DNA, 66 bp, Synthetic construct
  source 1..66: mol_type = other DNA
ttgtattgcgaaatttgcggctttgagtgcactcagaaaggtaacctcctccgccacattaaactg

SEQ ID NO: 1642 - DNA, 66 bp, Synthetic construct
  source 1..66: mol_type = other DNA
ttcttttgtgacgtgtgtggggcagcgtttactcagaaaggtaacctcctccgccacattaaactg

SEQ ID NO: 1643 - DNA, 66 bp, Synthetic construct
  source 1..66: mol_type = other DNA
ttctggtgtcccatctgtggggcaacctttactcagaaaggtaacctcctccgccacattaaactg

SEQ ID NO: 1644 - DNA, 66 bp, Synthetic construct
  source 1..66: mol_type = other DNA
ttctggtgtcccgtctgtggggcagtttttactcagaaaggtaacctcctccgccacattaaactg

SEQ ID NO: 1645 - DNA, 66 bp, Synthetic construct; identical to SEQ ID NO: 551
  source 1..66: mol_type = other DNA

SEQ ID NO: 1646 - DNA, 66 bp, Synthetic construct
  source 1..66: mol_type = other DNA
ttcaattgtgatatctgtggggcaggatttactcagaaaggtaacctcctccgccacattaaactg

SEQ ID NO: 1647 - DNA, 66 bp, Synthetic construct
  source 1..66: mol_type = other DNA
ttccactgtaatgtctgtggggcaccttttactcagaaaggtaacctcctccgccacattaaactg

SEQ ID NO: 1648 - DNA, 66 bp, Synthetic construct
  source 1..66: mol_type = other DNA
ttccattgtgaggtgtgtggggcatgctttactcagaaaggtaacctcctccgccacattaaactg

SEQ ID NO: 1649 - DNA, 66 bp, Synthetic construct
  source 1..66: mol_type = other DNA
ttcgcctgtgatatctgtggggcagtttttactcagaaaggtaacctcctccgccacattaaactg

SEQ ID NO: 1650 - DNA, 66 bp, Synthetic construct
  source 1..66: mol_type = other DNA
ttccattgtcctgtgtgtggggcatattttactcagaaaggtaacctcctccgccacattaaactg

SEQ ID NO: 1651 - DNA, 66 bp, Synthetic construct; identical to SEQ ID NO: 574
  source 1..66: mol_type = other DNA

SEQ ID NO: 1652 - DNA, 66 bp, Synthetic construct; identical to SEQ ID NO: 103
  source 1..66: mol_type = other DNA

SEQ ID NO: 1653 - DNA, 66 bp, Synthetic construct
  source 1..66: mol_type = other DNA
ttcgattgtgaaatctgtggggcaccttttactcagaaaggtaacctcctccgccacattaaactg

SEQ ID NO: 1654 - DNA, 66 bp, Synthetic construct
  source 1..66: mol_type = other DNA
ctgtcctgtgagatttgtggtttcgcgtgcactcagaaaggtaacctcctccgccacattaaactg

SEQ ID NO: 1655 - DNA, 66 bp, Synthetic construct
  source 1..66: mol_type = other DNA
ttcaactgtcccatctgtggggcatactttactcagaaaggtaacctcctccgccacattaaactg

SEQ ID NO: 1656 - DNA, 66 bp, Synthetic construct; identical to SEQ ID NO: 753
  source 1..66: mol_type = other DNA

SEQ ID NO: 1657 - DNA, 66 bp, Synthetic construct
  source 1..66: mol_type = other DNA
ctggcctgtccaatctgtggctttccatgcactcagaaaggtaacctcctccgccacattaaactg

SEQ ID NO: 1658 - DNA, 66 bp, Synthetic construct
  source 1..66: mol_type = other DNA
ttcaattgtgaagtgtgtggggcacactttactcagaaaggtaacctcctccgccacattaaactg

SEQ ID NO: 1659 - DNA, 66 bp, Synthetic construct
  source 1..66: mol_type = other DNA
ttcgcctgtcccgtctgtggggcagaatttactcagaaaggtaacctcctccgccacattaaactg

SEQ ID NO: 1660 - DNA, 66 bp, Synthetic construct
  source 1..66: mol_type = other DNA
ttcatgtgtccagtttgtggggcaggctttactcagaaaggtaacctcctccgccacattaaactg

SEQ ID NO: 1661 - DNA, 66 bp, Synthetic construct
  source 1..66: mol_type = other DNA
ttcttctgtaatatctgtggggcagcatttactcagaaaggtaacctcctccgccacattaaactg

SEQ ID NO: 1662 - DNA, 66 bp, Synthetic construct
  source 1..66: mol_type = other DNA
cttcactgtcctatctgtgggttcaaatgcactcagaaaggtaacctcctccgccacattaaactg

SEQ ID NO: 1663 - DNA, 66 bp, Synthetic construct
  source 1..66: mol_type = other DNA
ttctggtgtaacatttgtggggcaagatttactcagaaaggtaacctcctccgccacattaaactg

SEQ ID NO: 1664 - DNA, 66 bp, Synthetic construct
  source 1..66: mol_type = other DNA
ttcttctgtccggtgtgtggggcattttttactcagaaaggtaacctcctccgccacattaaactg

SEQ ID NO: 1665 - DNA, 66 bp, Synthetic construct
  source 1..66: mol_type = other DNA
ttctcgtgtgaggtctgtggggcacattttactcagaaaggtaacctcctccgccacattaaactg

SEQ ID NO: 1666 - DNA, 66 bp, Synthetic construct
  source 1..66: mol_type = other DNA
ttctactgtgagcagtgtggggcacgctttactcagaaaggtaacctcctccgccacattaaactg

SEQ ID NO: 1667 - DNA, 66 bp, Synthetic construct
  source 1..66: mol_type = other DNA
ttcagttgtgaaatatgtggggcaatttttactcagaaaggtaacctcctccgccacattaaactg

SEQ ID NO: 1668 - DNA, 66 bp, Synthetic construct
  source 1..66: mol_type = other DNA
ttctcttgtgaggtttgtggggcagtgtttactcagaaaggtaacctcctccgccacattaaactg

SEQ ID NO: 1669 - DNA, 66 bp, Synthetic construct
  source 1..66: mol_type = other DNA
ttcggttgtccacagtgtggggcaaagtttactcagaaaggtaacctcctccgccacattaaactg

SEQ ID NO: 1670 - DNA, 66 bp, Synthetic construct
  source 1..66: mol_type = other DNA
ctttattgcccaatctgtgggtttaattgcactcagaaaggtaacctcctccgccacattaaactg

SEQ ID NO: 1671 - DNA, 66 bp, Synthetic construct
  source 1..66: mol_type = other DNA
ttaaactgcccgatctgcggattcggctgtactcagaaaggtaacctcctccgccacattaaactg

SEQ ID NO: 1672 - DNA, 66 bp, Synthetic construct
  source 1..66: mol_type = other DNA
ctgttttgcgaaatttgtggattcggatgcactcagaaaggtaacctcctccgccacattaaactg

SEQ ID NO: 1673 - DNA, 66 bp, Synthetic construct
  source 1..66: mol_type = other DNA
ttcaactgtgaaatctgtggggcatactttactcagaaaggtaacctcctccgccacattaaactg

SEQ ID NO: 1674 - DNA, 66 bp, Synthetic construct
  source 1..66: mol_type = other DNA
ttcggctgtgaggtctgtggggcactgtttactcagaaaggtaacctcctccgccacattaaactg

SEQ ID NO: 1675 - DNA, 66 bp, Synthetic construct
  source 1..66: mol_type = other DNA
ctccattgtccgatttgtggcttcatgtgtactcagaaaggtaacctcctccgccacattaaactg

SEQ ID NO: 1676 - DNA, 66 bp, Synthetic construct
  source 1..66: mol_type = other DNA
ttctggtgtgaagtttgtggggcactctttactcagaaaggtaacctcctccgccacattaaactg

SEQ ID NO: 1677 - DNA, 66 bp, Synthetic construct
  source 1..66: mol_type = other DNA
ttctactgtccagtgtgtggggcaatctttactcagaaaggtaacctcctccgccacattaaactg

SEQ ID NO: 1678 - DNA, 66 bp, Synthetic construct
  source 1..66: mol_type = other DNA
ttccactgtgatatttgtggggcagcatttactcagaaaggtaacctcctccgccacattaaactg

SEQ ID NO: 1679 - DNA, 66 bp, Synthetic construct; identical to SEQ ID NO: 149
  source 1..66: mol_type = other DNA

SEQ ID NO: 1680 - DNA, 66 bp, Synthetic construct
  source 1..66: mol_type = other DNA
ttcgattgtgagatctgtggggcaaattttactcagaaaggtaacctcctccgccacattaaactg

SEQ ID NO: 1681 - DNA, 66 bp, Synthetic construct
  source 1..66: mol_type = other DNA
ttcttctgtgaggtgtgtggggcattctttactcagaaaggtaacctcctccgccacattaaactg

SEQ ID NO: 1682 - DNA, 66 bp, Synthetic construct; identical to SEQ ID NO: 363
  source 1..66: mol_type = other DNA

SEQ ID NO: 1683 - DNA, 66 bp, Synthetic construct
  source 1..66: mol_type = other DNA
ttctcatgtcccgtttgtggggcatattttactcagaaaggtaacctcctccgccacattaaactg

SEQ ID NO: 1684 - DNA, 66 bp, Synthetic construct; identical to SEQ ID NO: 435
  source 1..66: mol_type = other DNA

SEQ ID NO: 1685 - DNA, 66 bp, Synthetic construct
  source 1..66: mol_type = other DNA
ttcgcatgtccgatttgtggggcattctttactcagaaaggtaacctcctccgccacattaaactg

SEQ ID NO: 1686 - DNA, 66 bp, Synthetic construct
  source 1..66: mol_type = other DNA
ttcttttgtaatatttgtggggcatcctttactcagaaaggtaacctcctccgccacattaaactg

SEQ ID NO: 1687 - DNA, 66 bp, Synthetic construct
  source 1..66: mol_type = other DNA
ttcagctgtcccatctgtggggcagtgtttactcagaaaggtaacctcctccgccacattaaactg

SEQ ID NO: 1688 - DNA, 66 bp, Synthetic construct
  source 1..66: mol_type = other DNA
ttcgggtgtgatatttgtggggcaagatttactcagaaaggtaacctcctccgccacattaaactg

SEQ ID NO: 1689 - DNA, 66 bp, Synthetic construct
  source 1..66: mol_type = other DNA
ttcaaatgtgagatttgtggggcagcatttactcagaaaggtaacctcctccgccacattaaactg

SEQ ID NO: 1690 - DNA, 66 bp, Synthetic construct
  source 1..66: mol_type = other DNA
cttagttgcccgatctgcgggtttaaatgtactcagaaaggtaacctcctccgccacattaaactg

SEQ ID NO: 1691 - DNA, 66 bp, Synthetic construct; identical to SEQ ID NO: 393
  source 1..66: mol_type = other DNA

SEQ ID NO: 1692 - DNA, 66 bp, Synthetic construct; identical to SEQ ID NO: 119
  source 1..66: mol_type = other DNA

SEQ ID NO: 1693 - DNA, 66 bp, Synthetic construct
  source 1..66: mol_type = other DNA
ttccactgtcctatttgtggggcacattttactcagaaaggtaacctcctccgccacattaaactg

SEQ ID NO: 1694 - DNA, 66 bp, Synthetic construct
  source 1..66: mol_type = other DNA
ttccattgtgacatatgtggggcaggttttactcagaaaggtaacctcctccgccacattaaactg

SEQ ID NO: 1695 - DNA, 66 bp, Synthetic construct
  source 1..66: mol_type = other DNA
ttcgactgtgaaatctgtggggcaaagtttactcagaaaggtaacctcctccgccacattaaactg

SEQ ID NO: 1696 - DNA, 66 bp, Synthetic construct
  source 1..66: mol_type = other DNA
ttcaattgtccagtgtgtggggcacactttactcagaaaggtaacctcctccgccacattaaactg

SEQ ID NO: 1697 - DNA, 66 bp, Synthetic construct
  source 1..66: mol_type = other DNA
ttctattgtaacatctgtggggcaatgtttactcagaaaggtaacctcctccgccacattaaactg

SEQ ID NO: 1698 - DNA, 66 bp, Synthetic construct
  source 1..66: mol_type = other DNA
ctgggatgcgagatctgcggctttagatgcactcagaaaggtaacctcctccgccacattaaactg

SEQ ID NO: 1699 - DNA, 66 bp, Synthetic construct
  source 1..66: mol_type = other DNA
ttcaattgtcctatctgtggggcaaattttactcagaaaggtaacctcctccgccacattaaactg

SEQ ID NO: 1700 - DNA, 66 bp, Synthetic construct
  source 1..66: mol_type = other DNA
ttctcttgtcccgtgtgtggggcaaagtttactcagaaaggtaacctcctccgccacattaaactg

SEQ ID NO: 1701 - DNA, 66 bp, Synthetic construct
  source 1..66: mol_type = other DNA
ttcgcttgtgacatctgtggggcaatttttactcagaaaggtaacctcctccgccacattaaactg

SEQ ID NO: 1702 - DNA, 66 bp, Synthetic construct
  source 1..66: mol_type = other DNA
ttcaaatgtgaagtatgtggggcagcttttactcagaaaggtaacctcctccgccacattaaactg

SEQ ID NO: 1703 - DNA, 66 bp, Synthetic construct
  source 1..66: mol_type = other DNA
ttcttttgtgatgtatgtggggcaggatttactcagaaaggtaacctcctccgccacattaaactg

SEQ ID NO: 1704 - DNA, 66 bp, Synthetic construct
  source 1..66: mol_type = other DNA
ttcgcctgtgaggtgtgtggggcattctttactcagaaaggtaacctcctccgccacattaaactg

SEQ ID NO: 1705 - DNA, 66 bp, Synthetic construct; identical to SEQ ID NO: 558
  source 1..66: mol_type = other DNA

SEQ ID NO: 1706 - DNA, 66 bp, Synthetic construct; identical to SEQ ID NO: 432
  source 1..66: mol_type = other DNA

SEQ ID NO: 1707 - DNA, 66 bp, Synthetic construct
  source 1..66: mol_type = other DNA
ttcgcttgtaatatttgtggggcatgttttactcagaaaggtaacctcctccgccacattaaactg

SEQ ID NO: 1708 - DNA, 66 bp, Synthetic construct
  source 1..66: mol_type = other DNA
ttcaactgtgaagtgtgtggggcacgctttactcagaaaggtaacctcctccgccacattaaactg

SEQ ID NO: 1709 - DNA, 66 bp, Synthetic construct
  source 1..66: mol_type = other DNA
ttcggatgtgaaatctgtggggcaggctttactcagaaaggtaacctcctccgccacattaaactg

SEQ ID NO: 1710 - DNA, 66 bp, Synthetic construct; identical to SEQ ID NO: 484
  source 1..66: mol_type = other DNA

SEQ ID NO: 1711 - DNA, 66 bp, Synthetic construct
  source 1..66: mol_type = other DNA
ttctggtgtccagtttgtggggcaacctttactcagaaaggtaacctcctccgccacattaaactg

SEQ ID NO: 1712 - DNA, 66 bp, Synthetic construct
  source 1..66: mol_type = other DNA
ttgtggtgtcctatttgtgggttcgagtgcactcagaaaggtaacctcctccgccacattaaactg

SEQ ID NO: 1713 - DNA, 66 bp, Synthetic construct
  source 1..66: mol_type = other DNA
ttcggttgtgatatttgtggggcatgttttactcagaaaggtaacctcctccgccacattaaactg

SEQ ID NO: 1714 - DNA, 66 bp, Synthetic construct; identical to SEQ ID NO: 503
  source 1..66: mol_type = other DNA

SEQ ID NO: 1715 - DNA, 66 bp, Synthetic construct
  source 1..66: mol_type = other DNA
tttttctgcgagatctgtggtagacggttcactcagaaaggtaacctcctccgccacattaaactg

SEQ ID NO: 1716 - DNA, 66 bp, Synthetic construct
  source 1..66: mol_type = other DNA
ttcagttgtgaaatctgtggggcaaactttactcagaaaggtaacctcctccgccacattaaactg

SEQ ID NO: 1717 - DNA, 66 bp, Synthetic construct
  source 1..66: mol_type = other DNA
ttctattgtgaacagtgtggggcatgttttactcagaaaggtaacctcctccgccacattaaactg

SEQ ID NO: 1718 - DNA, 66 bp, Synthetic construct
  source 1..66: mol_type = other DNA
ctccactgtgaaatttgtggtttcaagtgcactcagaaaggtaacctcctccgccacattaaactg

SEQ ID NO: 1719 - DNA, 66 bp, Synthetic construct
  source 1..66: mol_type = other DNA
ttcggctgtgaagtctgtggggcattctttactcagaaaggtaacctcctccgccacattaaactg

SEQ ID NO: 1720 - DNA, 66 bp, Synthetic construct
  source 1..66: mol_type = other DNA
ttcaattgtgaggtgtgtggggcatgctttactcagaaaggtaacctcctccgccacattaaactg

SEQ ID NO: 1721 - DNA, 66 bp, Synthetic construct
  source 1..66: mol_type = other DNA
ttcacttgtgatatctgtggggcaccctttactcagaaaggtaacctcctccgccacattaaactg

SEQ ID NO: 1722 - DNA, 66 bp, Synthetic construct
  source 1..66: mol_type = other DNA
ttcaattgtccgatttgtggggcaaggtttactcagaaaggtaacctcctccgccacattaaactg

SEQ ID NO: 1723 - DNA, 66 bp, Synthetic construct; identical to SEQ ID NO: 232
  source 1..66: mol_type = other DNA

SEQ ID NO: 1724 - DNA, 66 bp, Synthetic construct
  source 1..66: mol_type = other DNA
ttcaattgtgaggtgtgtggggcaaattttactcagaaaggtaacctcctccgccacattaaactg

SEQ ID NO: 1725 - DNA, 66 bp, Synthetic construct
  source 1..66: mol_type = other DNA
ttcgactgtgaagtgtgtggggcagcttttactcagaaaggtaacctcctccgccacattaaactg

SEQ ID NO: 1726 - DNA, 66 bp, Synthetic construct
  source 1..66: mol_type = other DNA
ttctgctgtgaagtgtgtggggcaaactttactcagaaaggtaacctcctccgccacattaaactg

SEQ ID NO: 1727 - DNA, 66 bp, Synthetic construct; identical to SEQ ID NO: 567
  source 1..66: mol_type = other DNA

SEQ ID NO: 1728 - DNA, 66 bp, Synthetic construct
  source 1..66: mol_type = other DNA
ttcgattgtccagtgtgtggggcaaactttactcagaaaggtaacctcctccgccacattaaactg

SEQ ID NO: 1729 - DNA, 66 bp, Synthetic construct
  source 1..66: mol_type = other DNA
ttccactgtcccatttgtggacgtcccttcactcagaaaggtaacctcctccgccacattaaactg

SEQ ID NO: 1730 - DNA, 66 bp, Synthetic construct
  source 1..66: mol_type = other DNA
ttcaaatgtcctatctgtggggcaggatttactcagaaaggtaacctcctccgccacattaaactg

SEQ ID NO: 1731 - DNA, 66 bp, Synthetic construct
  source 1..66: mol_type = other DNA
ttctcctgtgacatttgtggggcaggatttactcagaaaggtaacctcctccgccacattaaactg

SEQ ID NO: 1732 - DNA, 66 bp, Synthetic construct; identical to SEQ ID NO: 711
  source 1..66: mol_type = other DNA

SEQ ID NO: 1733 - DNA, 66 bp, Synthetic construct; identical to SEQ ID NO: 288
  source 1..66: mol_type = other DNA

SEQ ID NO: 1734 - DNA, 66 bp, Synthetic construct
  source 1..66: mol_type = other DNA
ttcaactgtcctatttgtggggcaaagtttactcagaaaggtaacctcctccgccacattaaactg

SEQ ID NO: 1735 - DNA, 66 bp, Synthetic construct; identical to SEQ ID NO: 624
  source 1..66: mol_type = other DNA

SEQ ID NO: 1736 - DNA, 66 bp, Synthetic construct
  source 1..66: mol_type = other DNA
tttggctgtccaatctgtggccggggtttcactcagaaaggtaacctcctccgccacattaaactg

SEQ ID NO: 1737 - DNA, 66 bp, Synthetic construct
  source 1..66: mol_type = other DNA
ttctactgtgacgtttgtggggcaacctttactcagaaaggtaacctcctccgccacattaaactg

SEQ ID NO: 1738 - DNA, 66 bp, Synthetic construct; identical to SEQ ID NO: 530
  source 1..66: mol_type = other DNA

SEQ ID NO: 1739 - DNA, 66 bp, Synthetic construct
  source 1..66: mol_type = other DNA
ctgggttgtgagatctgcggcttccagtgtactcagaaaggtaacctcctccgccacattaaactg

SEQ ID NO: 1740 - DNA, 66 bp, Synthetic construct
  source 1..66: mol_type = other DNA
ttctgctgtgaaatttgtggggcacactttactcagaaaggtaacctcctccgccacattaaactg

SEQ ID NO: 1741 - DNA, 66 bp, Synthetic construct; identical to SEQ ID NO: 529
  source 1..66: mol_type = other DNA

SEQ ID NO: 1742 - DNA, 66 bp, Synthetic construct
  source 1..66: mol_type = other DNA
ttcgactgtgagatatgtggggcacagtttactcagaaaggtaacctcctccgccacattaaactg

SEQ ID NO: 1743 - DNA, 66 bp, Synthetic construct
  source 1..66: mol_type = other DNA
ttcgcctgtaacgtgtgtggggcaagatttactcagaaaggtaacctcctccgccacattaaactg

SEQ ID NO: 1744 - DNA, 66 bp, Synthetic construct
  source 1..66: mol_type = other DNA
ttcaagtgtcccatatgtggggcagcatttactcagaaaggtaacctcctccgccacattaaactg

SEQ ID NO: 1745 - DNA, 66 bp, Synthetic construct
  source 1..66: mol_type = other DNA
ttcgcctgtgagatctgtggggcagattttactcagaaaggtaacctcctccgccacattaaactg

SEQ ID NO: 1746 - DNA, 66 bp, Synthetic construct
  source 1..66: mol_type = other DNA
ctcgcctgcgaaatatgcggttttgtctgcactcagaaaggtaacctcctccgccacattaaactg

SEQ ID NO: 1747 - DNA, 66 bp, Synthetic construct
  source 1..66: mol_type = other DNA
ctggcttgtcccatttgtggttttatttgtactcagaaaggtaacctcctccgccacattaaactg

SEQ ID NO: 1748 - DNA, 66 bp, Synthetic construct; identical to SEQ ID NO: 477
  source 1..66: mol_type = other DNA

SEQ ID NO: 1749 - DNA, 66 bp, Synthetic construct
  source 1..66: mol_type = other DNA
ttcgcctgtaacatttgtggggcacagtttactcagaaaggtaacctcctccgccacattaaactg

SEQ ID NO: 1750 - DNA, 66 bp, Synthetic construct
  source 1..66: mol_type = other DNA
ttcagctgtgaagtgtgtggggcatattttactcagaaaggtaacctcctccgccacattaaactg

SEQ ID NO: 1751 - DNA, 66 bp, Synthetic construct; identical to SEQ ID NO: 355
  source 1..66: mol_type = other DNA

SEQ ID NO: 1752 - DNA, 66 bp, Synthetic construct; identical to SEQ ID NO: 173
  source 1..66: mol_type = other DNA

SEQ ID NO: 1753 - DNA, 66 bp, Synthetic construct
  source 1..66: mol_type = other DNA
ttctggtgtaatatttgtggggcaatgtttactcagaaaggtaacctcctccgccacattaaactg

SEQ ID NO: 1754 - DNA, 66 bp, Synthetic construct
  source 1..66: mol_type = other DNA
ctacactgtccaatctgcggatttgagtgtactcagaaaggtaacctcctccgccacattaaactg

SEQ ID NO: 1755 - DNA, 66 bp, Synthetic construct
  source 1..66: mol_type = other DNA
ctcttttgccccatctgtggatttccatgtactcagaaaggtaacctcctccgccacattaaactg

SEQ ID NO: 1756 - DNA, 66 bp, Synthetic construct
  source 1..66: mol_type = other DNA
ttcaactgtcccgtctgtggggcacgctttactcagaaaggtaacctcctccgccacattaaactg

SEQ ID NO: 1757 - DNA, 66 bp, Synthetic construct
  source 1..66: mol_type = other DNA
ttctggtgtaacatctgtggggcacagtttactcagaaaggtaacctcctccgccacattaaactg

SEQ ID NO: 1758 - DNA, 66 bp, Synthetic construct; identical to SEQ ID NO: 164
  source 1..66: mol_type = other DNA

SEQ ID NO: 1759 - DNA, 66 bp, Synthetic construct
  source 1..66: mol_type = other DNA
ttcctctgtgagatatgtggggcagcgtttactcagaaaggtaacctcctccgccacattaaactg

SEQ ID NO: 1760 - DNA, 66 bp, Synthetic construct
  source 1..66: mol_type = other DNA
ttgagatgtgaaatttgtggcttcggttgcactcagaaaggtaacctcctccgccacattaaactg

SEQ ID NO: 1761 - DNA, 66 bp, Synthetic construct
  source 1..66: mol_type = other DNA
ttcaagtgtgaggtgtgtggggcaccttttactcagaaaggtaacctcctccgccacattaaactg

SEQ ID NO: 1762 - DNA, 66 bp, Synthetic construct
  source 1..66: mol_type = other DNA
ttcttctgtaacatttgtggggcacaatttactcagaaaggtaacctcctccgccacattaaactg

SEQ ID NO: 1763 - DNA, 66 bp, Synthetic construct
  source 1..66: mol_type = other DNA
ttcgcctgtcctcaatgtggggcacgttttactcagaaaggtaacctcctccgccacattaaactg

SEQ ID NO: 1764 - DNA, 66 bp, Synthetic construct
  source 1..66: mol_type = other DNA
ttttggtgcccaatttgtggccgcccatttactcagaaaggtaacctcctccgccacattaaactg

SEQ ID NO: 1765 - DNA, 66 bp, Synthetic construct
  source 1..66: mol_type = other DNA
ttcaattgtcccgtgtgtggggcacagtttactcagaaaggtaacctcctccgccacattaaactg

SEQ ID NO: 1766 - DNA, 66 bp, Synthetic construct
  source 1..66: mol_type = other DNA
ttggcatgtgagatatgcggtttttgttgcactcagaaaggtaacctcctccgccacattaaactg

SEQ ID NO: 1767 - DNA, 66 bp, Synthetic construct
  source 1..66: mol_type = other DNA
ttccattgtgacatttgtggggcaaaatttactcagaaaggtaacctcctccgccacattaaactg

SEQ ID NO: 1768 - DNA, 66 bp, Synthetic construct
  source 1..66: mol_type = other DNA
ctctactgtgaaatttgtggattcaattgtactcagaaaggtaacctcctccgccacattaaactg

SEQ ID NO: 1769 - DNA, 66 bp, Synthetic construct
  source 1..66: mol_type = other DNA
ttctggtgtgatgtgtgtggggcaatgtttactcagaaaggtaacctcctccgccacattaaactg

SEQ ID NO: 1770 - DNA, 66 bp, Synthetic construct; identical to SEQ ID NO: 476
  source 1..66: mol_type = other DNA

SEQ ID NO: 1771 - DNA, 66 bp, Synthetic construct; identical to SEQ ID NO: 777
  source 1..66: mol_type = other DNA

SEQ ID NO: 1772 - DNA, 66 bp, Synthetic construct; identical to SEQ ID NO: 1293
  source 1..66: mol_type = other DNA

SEQ ID NO: 1773 - DNA, 66 bp, Synthetic construct; identical to SEQ ID NO: 1757
  source 1..66: mol_type = other DNA

SEQ ID NO: 1774 - DNA, 66 bp, Synthetic construct; identical to SEQ ID NO: 1104
  source 1..66: mol_type = other DNA

SEQ ID NO: 1775 - DNA, 66 bp, Synthetic construct; identical to SEQ ID NO: 787
  source 1..66: mol_type = other DNA

SEQ ID NO: 1776 - DNA, 66 bp, Synthetic construct; identical to SEQ ID NO: 1382
  source 1..66: mol_type = other DNA

SEQ ID NO: 1777 - DNA, 66 bp, Synthetic construct; identical to SEQ ID NO: 808
  source 1..66: mol_type = other DNA

SEQ ID NO: 1778 - DNA, 66 bp, Synthetic construct; identical to SEQ ID NO: 1008
  source 1..66: mol_type = other DNA

SEQ ID NO: 1779 - DNA, 66 bp, Synthetic construct; identical to SEQ ID NO: 1372
  source 1..66: mol_type = other DNA

SEQ ID NO: 1780 - DNA, 66 bp, Synthetic construct; identical to SEQ ID NO: 693
  source 1..66: mol_type = other DNA

SEQ ID NO: 1781 - DNA, 66 bp, Synthetic construct
  source 1..66: mol_type = other DNA
ttctggtgtgagcagtgtggggcatcctttactcagaaaggtaacctcctccgccacattaaactg

SEQ ID NO: 1782 - DNA, 66 bp, Synthetic construct; identical to SEQ ID NO: 909
  source 1..66: mol_type = other DNA

SEQ ID NO: 1783 - DNA, 66 bp, Synthetic construct; identical to SEQ ID NO: 774
  source 1..66: mol_type = other DNA

SEQ ID NO: 1784 - DNA, 66 bp, Synthetic construct; identical to SEQ ID NO: 859
  source 1..66: mol_type = other DNA

SEQ ID NO: 1785 - DNA, 66 bp, Synthetic construct; identical to SEQ ID NO: 1416
  source 1..66: mol_type = other DNA

SEQ ID NO: 1786 - DNA, 66 bp, Synthetic construct; identical to SEQ ID NO: 758
  source 1..66: mol_type = other DNA

SEQ ID NO: 1787 - DNA, 66 bp, Synthetic construct; identical to SEQ ID NO: 934
  source 1..66: mol_type = other DNA

SEQ ID NO: 1788 - DNA, 66 bp, Synthetic construct; identical to SEQ ID NO: 803
  source 1..66: mol_type = other DNA

SEQ ID NO: 1789 - DNA, 66 bp, Synthetic construct
  source 1..66: mol_type = other DNA
ttctggtgtaacgtctgtggggcatcttttactcagaaaggtaacctcctccgccacattaaactg

SEQ ID NO: 1790 - DNA, 66 bp, Synthetic construct; identical to SEQ ID NO: 740
  source 1..66: mol_type = other DNA

SEQ ID NO: 1791 - DNA, 66 bp, Synthetic construct; identical to SEQ ID NO: 1139
  source 1..66: mol_type = other DNA

SEQ ID NO: 1792 - DNA, 66 bp, Synthetic construct; identical to SEQ ID NO: 1328
  source 1..66: mol_type = other DNA

SEQ ID NO: 1793 - DNA, 66 bp, Synthetic construct; identical to SEQ ID NO: 1317
  source 1..66: mol_type = other DNA

SEQ ID NO: 1794 - DNA, 66 bp, Synthetic construct; identical to SEQ ID NO: 1276
  source 1..66: mol_type = other DNA

SEQ ID NO: 1795 - DNA, 66 bp, Synthetic construct; identical to SEQ ID NO: 1609
  source 1..66: mol_type = other DNA

SEQ ID NO: 1796 - DNA, 66 bp, Synthetic construct
  source 1..66: mol_type = other DNA
ttctggtgtaaccaatgtggggcaaactttactcagaaaggtaacctcctccgccacattaaactg

SEQ ID NO: 1797 - DNA, 66 bp, Synthetic construct; identical to SEQ ID NO: 1333
  source 1..66: mol_type = other DNA

SEQ ID NO: 1798 - DNA, 66 bp, Synthetic construct; identical to SEQ ID NO: 827
  source 1..66: mol_type = other DNA

SEQ ID NO: 1799 - DNA, 66 bp, Synthetic construct; identical to SEQ ID NO: 1130
  source 1..66: mol_type = other DNA

SEQ ID NO: 1800 - DNA, 66 bp, Synthetic construct; identical to SEQ ID NO: 818
  source 1..66: mol_type = other DNA

SEQ ID NO: 1801 - DNA, 66 bp, Synthetic construct; identical to SEQ ID NO: 1001
  source 1..66: mol_type = other DNA

SEQ ID NO: 1802 - DNA, 66 bp, Synthetic construct; identical to SEQ ID NO: 794
  source 1..66: mol_type = other DNA

SEQ ID NO: 1803 - DNA, 66 bp, Synthetic construct; identical to SEQ ID NO: 788
  source 1..66: mol_type = other DNA

SEQ ID NO: 1804 - DNA, 66 bp, Synthetic construct
  source 1..66: mol_type = other DNA
ttctggtgtaatgtgtgtggggcatgttttactcagaaaggtaacctcctccgccacattaaactg

SEQ ID NO: 1805 - DNA, 66 bp, Synthetic construct; identical to SEQ ID NO: 870
  source 1..66: mol_type = other DNA

SEQ ID NO: 1806 - DNA, 66 bp, Synthetic construct
  source 1..66: mol_type = other DNA
ttctggtgtaatgtatgtggggcaaattttactcagaaaggtaacctcctccgccacattaaactg

SEQ ID NO: 1807 - DNA, 66 bp, Synthetic construct; identical to SEQ ID NO: 1265
  source 1..66: mol_type = other DNA

SEQ ID NO: 1808 - DNA, 66 bp, Synthetic construct; identical to SEQ ID NO: 767
  source 1..66: mol_type = other DNA

SEQ ID NO: 1809 - DNA, 66 bp, Synthetic construct; identical to SEQ ID NO: 735
  source 1..66: mol_type = other DNA

SEQ ID NO: 1810 - DNA, 66 bp, Synthetic construct
  source 1..66: mol_type = other DNA
ttctggtgtccccagtgtggggcaaactttactcagaaaggtaacctcctccgccacattaaactg

SEQ ID NO: 1811 - DNA, 66 bp, Synthetic construct; identical to SEQ ID NO: 933
  source 1..66: mol_type = other DNA

SEQ ID NO: 1812 - DNA, 66 bp, Synthetic construct
  source 1..66: mol_type = other DNA
ttctggtgtgatgtctgtggggcacactttactcagaaaggtaacctcctccgccacattaaactg

SEQ ID NO: 1813 - DNA, 66 bp, Synthetic construct; identical to SEQ ID NO: 854
  source 1..66: mol_type = other DNA

SEQ ID NO: 1814 - DNA, 66 bp, Synthetic construct; identical to SEQ ID NO: 1099
  source 1..66: mol_type = other DNA

SEQ ID NO: 1815 - DNA, 66 bp, Synthetic construct; identical to SEQ ID NO: 1140
  source 1..66: mol_type = other DNA

SEQ ID NO: 1816 - DNA, 66 bp, Synthetic construct; identical to SEQ ID NO: 913
  source 1..66: mol_type = other DNA

SEQ ID NO: 1817 - DNA, 66 bp, Synthetic construct; identical to SEQ ID NO: 612
  source 1..66: mol_type = other DNA

SEQ ID NO: 1818 - DNA, 66 bp, Synthetic construct; identical to SEQ ID NO: 975
  source 1..66: mol_type = other DNA

SEQ ID NO: 1819 - DNA, 66 bp, Synthetic construct; identical to SEQ ID NO: 1046
  source 1..66: mol_type = other DNA

SEQ ID NO: 1820 - DNA, 66 bp, Synthetic construct; identical to SEQ ID NO: 971
  source 1..66: mol_type = other DNA

SEQ ID NO: 1821 - DNA, 66 bp, Synthetic construct; identical to SEQ ID NO: 1077
  source 1..66: mol_type = other DNA

SEQ ID NO: 1822 - DNA, 66 bp, Synthetic construct; identical to SEQ ID NO: 785
  source 1..66: mol_type = other DNA

SEQ ID NO: 1823 - DNA, 66 bp, Synthetic construct; identical to SEQ ID NO: 955
  source 1..66: mol_type = other DNA

SEQ ID NO: 1824 - DNA, 66 bp, Synthetic construct; identical to SEQ ID NO: 986
  source 1..66: mol_type = other DNA

SEQ ID NO: 1825 - DNA, 66 bp, Synthetic construct; identical to SEQ ID NO: 836
  source 1..66: mol_type = other DNA

SEQ ID NO: 1826 - DNA, 66 bp, Synthetic construct; identical to SEQ ID NO: 1068
  source 1..66: mol_type = other DNA

SEQ ID NO: 1827 - DNA, 66 bp, Synthetic construct; identical to SEQ ID NO: 1112
  source 1..66: mol_type = other DNA

SEQ ID NO: 1828 - DNA, 66 bp, Synthetic construct; identical to SEQ ID NO: 1218
  source 1..66: mol_type = other DNA

SEQ ID NO: 1829 - DNA, 66 bp, Synthetic construct; identical to SEQ ID NO: 1307
  source 1..66: mol_type = other DNA

SEQ ID NO: 1830 - DNA, 66 bp, Synthetic construct; identical to SEQ ID NO: 800
  source 1..66: mol_type = other DNA

SEQ ID NO: 1831 - DNA, 66 bp, Synthetic construct; identical to SEQ ID NO: 1179
  source 1..66: mol_type = other DNA

SEQ ID NO: 1832 - DNA, 66 bp, Synthetic construct; identical to SEQ ID NO: 792
  source 1..66: mol_type = other DNA

SEQ ID NO: 1833 - DNA, 66 bp, Synthetic construct; identical to SEQ ID NO: 1248
  source 1..66: mol_type = other DNA

SEQ ID NO: 1834 - DNA, 66 bp, Synthetic construct; identical to SEQ ID NO: 1663
  source 1..66: mol_type = other DNA

SEQ ID NO: 1835 - DNA, 66 bp, Synthetic construct; identical to SEQ ID NO: 875
  source 1..66: mol_type = other DNA

SEQ ID NO: 1836 - DNA, 66 bp, Synthetic construct; identical to SEQ ID NO: 1629
  source 1..66: mol_type = other DNA

SEQ ID NO: 1837 - DNA, 66 bp, Synthetic construct; identical to SEQ ID NO: 1189
  source 1..66: mol_type = other DNA

SEQ ID NO: 1838 - DNA, 66 bp, Synthetic construct
  source 1..66: mol_type = other DNA
ttctggtgtgaccaatgtggggcaaactttactcagaaaggtaacctcctccgccacattaaactg

SEQ ID NO: 1839 - DNA, 66 bp, Synthetic construct; identical to SEQ ID NO: 1558
  source 1..66: mol_type = other DNA

SEQ ID NO: 1840 - DNA, 66 bp, Synthetic construct; identical to SEQ ID NO: 404
  source 1..66: mol_type = other DNA

SEQ ID NO: 1841 - DNA, 66 bp, Synthetic construct; identical to SEQ ID NO: 831
  source 1..66: mol_type = other DNA

SEQ ID NO: 1842 - DNA, 66 bp, Synthetic construct; identical to SEQ ID NO: 1038
  source 1..66: mol_type = other DNA

SEQ ID NO: 1843 - DNA, 66 bp, Synthetic construct; identical to SEQ ID NO: 1643
  source 1..66: mol_type = other DNA

SEQ ID NO: 1844 - DNA, 66 bp, Synthetic construct; identical to SEQ ID NO: 327
  source 1..66: mol_type = other DNA

SEQ ID NO: 1845 - DNA, 66 bp, Synthetic construct; identical to SEQ ID NO: 1580
  source 1..66: mol_type = other DNA

SEQ ID NO: 1846 - DNA, 66 bp, Synthetic construct; identical to SEQ ID NO: 972
  source 1..66: mol_type = other DNA

SEQ ID NO: 1847 - DNA, 66 bp, Synthetic construct; identical to SEQ ID NO: 692
  source 1..66: mol_type = other DNA

SEQ ID NO: 1848 - DNA, 66 bp, Synthetic construct
  source 1..66: mol_type = other DNA
ttctggtgtgacgtgtgtggggcagtctttactcagaaaggtaacctcctccgccacattaaactg

SEQ ID NO: 1849 - DNA, 66 bp, Synthetic construct
  source 1..66: mol_type = other DNA
ttctggtgtaaccagtgtggggcaagttttactcagaaaggtaacctcctccgccacattaaactg

SEQ ID NO: 1850 - DNA, 66 bp, Synthetic construct; identical to SEQ ID NO: 853
  source 1..66: mol_type = other DNA

SEQ ID NO: 1851 - DNA, 66 bp, Synthetic construct; identical to SEQ ID NO: 1423
  source 1..66: mol_type = other DNA

SEQ ID NO: 1852 - DNA, 66 bp, Synthetic construct; identical to SEQ ID NO: 1103
  source 1..66: mol_type = other DNA

SEQ ID NO: 1853 - DNA, 66 bp, Synthetic construct; identical to SEQ ID NO: 1015
  source 1..66: mol_type = other DNA

SEQ ID NO: 1854 - DNA, 66 bp, Synthetic construct; identical to SEQ ID NO: 1711
  source 1..66: mol_type = other DNA

SEQ ID NO: 1855 - DNA, 66 bp, Synthetic construct; identical to SEQ ID NO: 1197
  source 1..66: mol_type = other DNA

SEQ ID NO: 1856 - DNA, 66 bp, Synthetic construct; identical to SEQ ID NO: 69
  source 1..66: mol_type = other DNA

SEQ ID NO: 1857 - DNA, 66 bp, Synthetic construct
  source 1..66: mol_type = other DNA
ttctggtgtaatatctgtggggcaacatttactcagaaaggtaacctcctccgccacattaaactg

SEQ ID NO: 1858 - DNA, 66 bp, Synthetic construct; identical to SEQ ID NO: 921
  source 1..66: mol_type = other DNA

SEQ ID NO: 1859 - DNA, 66 bp, Synthetic construct
  source 1..66: mol_type = other DNA
ttctggtgtaacgtatgtggggcacagtttactcagaaaggtaacctcctccgccacattaaactg

SEQ ID NO: 1860 - DNA, 66 bp, Synthetic construct; identical to SEQ ID NO: 1028
  source 1..66: mol_type = other DNA

SEQ ID NO: 1861 - DNA, 66 bp, Synthetic construct; identical to SEQ ID NO: 820
  source 1..66: mol_type = other DNA

SEQ ID NO: 1862 - DNA, 66 bp, Synthetic construct
  source 1..66: mol_type = other DNA
ttctggtgtgagcagtgtggggcagcttttactcagaaaggtaacctcctccgccacattaaactg

SEQ ID NO: 1863 - DNA, 66 bp, Synthetic construct; identical to SEQ ID NO: 1111
  source 1..66: mol_type = other DNA

SEQ ID NO: 1864 - DNA, 66 bp, Synthetic construct; identical to SEQ ID NO: 946
  source 1..66: mol_type = other DNA

SEQ ID NO: 1865 - DNA, 66 bp, Synthetic construct; identical to SEQ ID NO: 872
  source 1..66: mol_type = other DNA

SEQ ID NO: 1866 - DNA, 66 bp, Synthetic construct; identical to SEQ ID NO: 1247
  source 1..66: mol_type = other DNA

SEQ ID NO: 1867 - DNA, 66 bp, Synthetic construct; identical to SEQ ID NO: 498
  source 1..66: mol_type = other DNA

SEQ ID NO: 1868 - DNA, 66 bp, Synthetic construct; identical to SEQ ID NO: 1164
  source 1..66: mol_type = other DNA

SEQ ID NO: 1869 - DNA, 66 bp, Synthetic construct
  source 1..66: mol_type = other DNA
ttctggtgtgatgtctgtggggcaacgtttactcagaaaggtaacctcctccgccacattaaactg

SEQ ID NO: 1870 - DNA, 66 bp, Synthetic construct; identical to SEQ ID NO: 1231
  source 1..66: mol_type = other DNA

SEQ ID NO: 1871 - DNA, 66 bp, Synthetic construct; identical to SEQ ID NO: 491
  source 1..66: mol_type = other DNA

SEQ ID NO: 1872 - DNA, 66 bp, Synthetic construct
  source 1..66: mol_type = other DNA
ttctggtgtaatgtctgtggggcagcctttactcagaaaggtaacctcctccgccacattaaactg

SEQ ID NO: 1873 - DNA, 66 bp, Synthetic construct; identical to SEQ ID NO: 1048
  source 1..66: mol_type = other DNA

SEQ ID NO: 1874 - DNA, 66 bp, Synthetic construct
  source 1..66: mol_type = other DNA
ttctggtgtgagcagtgtggggcatgctttactcagaaaggtaacctcctccgccacattaaactg

SEQ ID NO: 1875 - DNA, 66 bp, Synthetic construct; identical to SEQ ID NO: 1753
  source 1..66: mol_type = other DNA

SEQ ID NO: 1876 - DNA, 66 bp, Synthetic construct
  source 1..66: mol_type = other DNA
ttctggtgtaatatctgtggggcagtctttactcagaaaggtaacctcctccgccacattaaactg

SEQ ID NO: 1877 - DNA, 66 bp, Synthetic construct; identical to SEQ ID NO: 439
  source 1..66: mol_type = other DNA

SEQ ID NO: 1878 - DNA, 66 bp, Synthetic construct; identical to SEQ ID NO: 902
  source 1..66: mol_type = other DNA

SEQ ID NO: 1879 - DNA, 66 bp, Synthetic construct; identical to SEQ ID NO: 852
  source 1..66: mol_type = other DNA

SEQ ID NO: 1880 - DNA, 66 bp, Synthetic construct
  source 1..66: mol_type = other DNA
ttctggtgtgacgtttgtggggcaaattttactcagaaaggtaacctcctccgccacattaaactg

SEQ ID NO: 1881 - DNA, 66 bp, Synthetic construct; identical to SEQ ID NO: 885
  source 1..66: mol_type = other DNA

SEQ ID NO: 1882 - DNA, 66 bp, Synthetic construct; identical to SEQ ID NO: 991
  source 1..66: mol_type = other DNA

SEQ ID NO: 1883 - DNA, 66 bp, Synthetic construct; identical to SEQ ID NO: 1167
  source 1..66: mol_type = other DNA

SEQ ID NO: 1884 - DNA, 66 bp, Synthetic construct; identical to SEQ ID NO: 378
  source 1..66: mol_type = other DNA

SEQ ID NO: 1885 - DNA, 66 bp, Synthetic construct; identical to SEQ ID NO: 928
  source 1..66: mol_type = other DNA

SEQ ID NO: 1886 - DNA, 66 bp, Synthetic construct; identical to SEQ ID NO: 1394
  source 1..66: mol_type = other DNA

SEQ ID NO: 1887 - DNA, 66 bp, Synthetic construct; identical to SEQ ID NO: 1084
  source 1..66: mol_type = other DNA

SEQ ID NO: 1888 - DNA, 66 bp, Synthetic construct; identical to SEQ ID NO: 91
  source 1..66: mol_type = other DNA

SEQ ID NO: 1889 - DNA, 66 bp, Synthetic construct; identical to SEQ ID NO: 840
  source 1..66: mol_type = other DNA

SEQ ID NO: 1890 - DNA, 66 bp, Synthetic construct; identical to SEQ ID NO: 922
  source 1..66: mol_type = other DNA

SEQ ID NO: 1891 - DNA, 66 bp, Synthetic construct; identical to SEQ ID NO: 941
  source 1..66: mol_type = other DNA

SEQ ID NO: 1892 - DNA, 66 bp, Synthetic construct; identical to SEQ ID NO: 927
  source 1..66: mol_type = other DNA

SEQ ID NO: 1893 - DNA, 66 bp, Synthetic construct; identical to SEQ ID NO: 1051
  source 1..66: mol_type = other DNA

SEQ ID NO: 1894 - DNA, 66 bp, Synthetic construct
  source 1..66: mol_type = other DNA
ttctggtgtaatatctgtggggcacactttactcagaaaggtaacctcctccgccacattaaactg

SEQ ID NO: 1895 - DNA, 66 bp, Synthetic construct
  source 1..66: mol_type = other DNA
ttctggtgtcctcagtgtggggcacagtttactcagaaaggtaacctcctccgccacattaaactg

SEQ ID NO: 1896 - DNA, 66 bp, Synthetic construct; identical to SEQ ID NO: 466
  source 1..66: mol_type = other DNA

SEQ ID NO: 1897 - DNA, 66 bp, Synthetic construct
  source 1..66: mol_type = other DNA
ttctggtgtgaccaatgtggggcatcatttactcagaaaggtaacctcctccgccacattaaactg

SEQ ID NO: 1898 - DNA, 66 bp, Synthetic construct; identical to SEQ ID NO: 1600
  source 1..66: mol_type = other DNA

SEQ ID NO: 1899 - DNA, 66 bp, Synthetic construct; identical to SEQ ID NO: 963
  source 1..66: mol_type = other DNA

SEQ ID NO: 1900 - DNA, 66 bp, Synthetic construct; identical to SEQ ID NO: 1311
  source 1..66: mol_type = other DNA

SEQ ID NO: 1901 - DNA, 66 bp, Synthetic construct; identical to SEQ ID NO: 1520
  source 1..66: mol_type = other DNA

SEQ ID NO: 1902 - DNA, 66 bp, Synthetic construct; identical to SEQ ID NO: 763
  source 1..66: mol_type = other DNA

SEQ ID NO: 1903 - DNA, 66 bp, Synthetic construct; identical to SEQ ID NO: 1245
  source 1..66: mol_type = other DNA

SEQ ID NO: 1904 - DNA, 66 bp, Synthetic construct; identical to SEQ ID NO: 675
  source 1..66: mol_type = other DNA

SEQ ID NO: 1905 - DNA, 66 bp, Synthetic construct; identical to SEQ ID NO: 1769
  source 1..66: mol_type = other DNA

SEQ ID NO: 1906 - DNA, 66 bp, Synthetic construct; identical to SEQ ID NO: 1434
  source 1..66: mol_type = other DNA

SEQ ID NO: 1907 - DNA, 66 bp, Synthetic construct; identical to SEQ ID NO: 334
  source 1..66: mol_type = other DNA

SEQ ID NO: 1908 - DNA, 66 bp, Synthetic construct
  source 1..66: mol_type = other DNA
ttctggtgtgagcagtgtggggcaaactttactcagaaaggtaacctcctccgccacattaaactg

SEQ ID NO: 1909 - DNA, 66 bp, Synthetic construct; identical to SEQ ID NO: 1060
  source 1..66: mol_type = other DNA

SEQ ID NO: 1910 - DNA, 66 bp, Synthetic construct; identical to SEQ ID NO: 770
  source 1..66: mol_type = other DNA

SEQ ID NO: 1911 - DNA, 66 bp, Synthetic construct; identical to SEQ ID NO: 908
  source 1..66: mol_type = other DNA

SEQ ID NO: 1912 - DNA, 66 bp, Synthetic construct; identical to SEQ ID NO: 1059
  source 1..66: mol_type = other DNA

SEQ ID NO: 1913 - DNA, 66 bp, Synthetic construct; identical to SEQ ID NO: 40
  source 1..66: mol_type = other DNA

SEQ ID NO: 1914 - DNA, 66 bp, Synthetic construct; identical to SEQ ID NO: 956
  source 1..66: mol_type = other DNA

SEQ ID NO: 1915 - DNA, 66 bp, Synthetic construct; identical to SEQ ID NO: 1521
  source 1..66: mol_type = other DNA

SEQ ID NO: 1916 - DNA, 66 bp, Synthetic construct; identical to SEQ ID NO: 874
  source 1..66: mol_type = other DNA

SEQ ID NO: 1917 - DNA, 66 bp, Synthetic construct; identical to SEQ ID NO: 951
  source 1..66: mol_type = other DNA

SEQ ID NO: 1918 - DNA, 66 bp, Synthetic construct; identical to SEQ ID NO: 1201
  source 1..66: mol_type = other DNA

SEQ ID NO: 1919 - DNA, 66 bp, Synthetic construct; identical to SEQ ID NO: 1054
  source 1..66: mol_type = other DNA

SEQ ID NO: 1920 - DNA, 66 bp, Synthetic construct; identical to SEQ ID NO: 842
  source 1..66: mol_type = other DNA

SEQ ID NO: 1921 - DNA, 66 bp, Synthetic construct; identical to SEQ ID NO: 555
  source 1..66: mol_type = other DNA

SEQ ID NO: 1922 - DNA, 66 bp, Synthetic construct; identical to SEQ ID NO: 1107
  source 1..66: mol_type = other DNA

SEQ ID NO: 1923 - DNA, 66 bp, Synthetic construct; identical to SEQ ID NO: 786
  source 1..66: mol_type = other DNA

SEQ ID NO: 1924 - DNA, 66 bp, Synthetic construct; identical to SEQ ID NO: 1352
  source 1..66: mol_type = other DNA

SEQ ID NO: 1925 - DNA, 66 bp, Synthetic construct; identical to SEQ ID NO: 1530
  source 1..66: mol_type = other DNA

SEQ ID NO: 1926 - DNA, 66 bp, Synthetic construct
  source 1..66: mol_type = other DNA
ttctggtgtgagcagtgtggggcacaatttactcagaaaggtaacctcctccgccacattaaactg

SEQ ID NO: 1927 - DNA, 66 bp, Synthetic construct; identical to SEQ ID NO: 380
  source 1..66: mol_type = other DNA

SEQ ID NO: 1928 - DNA, 66 bp, Synthetic construct; identical to SEQ ID NO: 993
  source 1..66: mol_type = other DNA

SEQ ID NO: 1929 - DNA, 66 bp, Synthetic construct; identical to SEQ ID NO: 1009
  source 1..66: mol_type = other DNA

SEQ ID NO: 1930 - DNA, 66 bp, Synthetic construct; identical to SEQ ID NO: 1405
  source 1..66: mol_type = other DNA

SEQ ID NO: 1931 - DNA, 66 bp, Synthetic construct; identical to SEQ ID NO: 1073
  source 1..66: mol_type = other DNA

SEQ ID NO: 1932 - DNA, 66 bp, Synthetic construct; identical to SEQ ID NO: 1092
  source 1..66: mol_type = other DNA

SEQ ID NO: 1933 - DNA, 66 bp, Synthetic construct; identical to SEQ ID NO: 1010
  source 1..66: mol_type = other DNA

SEQ ID NO: 1934 - DNA, 66 bp, Synthetic construct; identical to SEQ ID NO: 1252
  source 1..66: mol_type = other DNA

SEQ ID NO: 1935 - DNA, 66 bp, Synthetic construct; identical to SEQ ID NO: 1058
  source 1..66: mol_type = other DNA

SEQ ID NO: 1936 - DNA, 66 bp, Synthetic construct; identical to SEQ ID NO: 1514
  source 1..66: mol_type = other DNA

SEQ ID NO: 1937 - DNA, 66 bp, Synthetic construct; identical to SEQ ID NO: 1339
  source 1..66: mol_type = other DNA

SEQ ID NO: 1938 - DNA, 66 bp, Synthetic construct; identical to SEQ ID NO: 1110
  source 1..66: mol_type = other DNA

SEQ ID NO: 1939 - DNA, 66 bp, Synthetic construct; identical to SEQ ID NO: 886
  source 1..66: mol_type = other DNA

SEQ ID NO: 1940 - DNA, 66 bp, Synthetic construct
  source 1..66: mol_type = other DNA
ttctggtgtaatatctgtggggcatattttactcagaaaggtaacctcctccgccacattaaactg

SEQ ID NO: 1941 - DNA, 66 bp, Synthetic construct; identical to SEQ ID NO: 978
  source 1..66: mol_type = other DNA

SEQ ID NO: 1942 - DNA, 66 bp, Synthetic construct; identical to SEQ ID NO: 1374
  source 1..66: mol_type = other DNA

SEQ ID NO: 1943 - DNA, 66 bp, Synthetic construct; identical to SEQ ID NO: 1286
  source 1..66: mol_type = other DNA

SEQ ID NO: 1944 - DNA, 66 bp, Synthetic construct; identical to SEQ ID NO: 1159
  source 1..66: mol_type = other DNA

SEQ ID NO: 1945 - DNA, 66 bp, Synthetic construct; identical to SEQ ID NO: 74
  source 1..66: mol_type = other DNA

SEQ ID NO: 1946 - DNA, 66 bp, Synthetic construct; identical to SEQ ID NO: 1016
  source 1..66: mol_type = other DNA

SEQ ID NO: 1947 - DNA, 66 bp, Synthetic construct; identical to SEQ ID NO: 695
  source 1..66: mol_type = other DNA

SEQ ID NO: 1948 - DNA, 66 bp, Synthetic construct; identical to SEQ ID NO: 776
  source 1..66: mol_type = other DNA

SEQ ID NO: 1949 - DNA, 66 bp, Synthetic construct; identical to SEQ ID NO: 642
  source 1..66: mol_type = other DNA

SEQ ID NO: 1950 - DNA, 66 bp, Synthetic construct; identical to SEQ ID NO: 1133
  source 1..66: mol_type = other DNA

SEQ ID NO: 1951 - DNA, 66 bp, Synthetic construct; identical to SEQ ID NO: 1623
  source 1..66: mol_type = other DNA

SEQ ID NO: 1952 - DNA, 66 bp, Synthetic construct; identical to SEQ ID NO: 793
  source 1..66: mol_type = other DNA

SEQ ID NO: 1953 - DNA, 66 bp, Synthetic construct; identical to SEQ ID NO: 1142
  source 1..66: mol_type = other DNA

SEQ ID NO: 1954 - DNA, 66 bp, Synthetic construct; identical to SEQ ID NO: 1390
  source 1..66: mol_type = other DNA

SEQ ID NO: 1955 - DNA, 66 bp, Synthetic construct; identical to SEQ ID NO: 1002
  source 1..66: mol_type = other DNA

SEQ ID NO: 1956 - DNA, 66 bp, Synthetic construct; identical to SEQ ID NO: 1426
  source 1..66: mol_type = other DNA

SEQ ID NO: 1957 - DNA, 66 bp, Synthetic construct; identical to SEQ ID NO: 1284
  source 1..66: mol_type = other DNA

SEQ ID NO: 1958 - DNA, 66 bp, Synthetic construct; identical to SEQ ID NO: 1232
  source 1..66: mol_type = other DNA

SEQ ID NO: 1959 - DNA, 66 bp, Synthetic construct; identical to SEQ ID NO: 1096
  source 1..66: mol_type = other DNA

SEQ ID NO: 1960 - DNA, 66 bp, Synthetic construct; identical to SEQ ID NO: 1419
  source 1..66: mol_type = other DNA

SEQ ID NO: 1961 - DNA, 66 bp, Synthetic construct; identical to SEQ ID NO: 995
  source 1..66: mol_type = other DNA

SEQ ID NO: 1962 - DNA, 66 bp, Synthetic construct; identical to SEQ ID NO: 1005
  source 1..66: mol_type = other DNA

SEQ ID NO: 1963 - DNA, 66 bp, Synthetic construct; identical to SEQ ID NO: 1067
  source 1..66: mol_type = other DNA

SEQ ID NO: 1964 - DNA, 66 bp, Synthetic construct; identical to SEQ ID NO: 967
  source 1..66: mol_type = other DNA

SEQ ID NO: 1965 - DNA, 66 bp, Synthetic construct; identical to SEQ ID NO: 1308
  source 1..66: mol_type = other DNA

SEQ ID NO: 1966 - DNA, 66 bp, Synthetic construct; identical to SEQ ID NO: 1519
  source 1..66: mol_type = other DNA

SEQ ID NO: 1967 - DNA, 66 bp, Synthetic construct; identical to SEQ ID NO: 896
  source 1..66: mol_type = other DNA

SEQ ID NO: 1968 - DNA, 66 bp, Synthetic construct; identical to SEQ ID NO: 1384
  source 1..66: mol_type = other DNA

SEQ ID NO: 1969 - DNA, 66 bp, Synthetic construct
  source 1..66: mol_type = other DNA
ttctggtgtcctcaatgtggggcaagttttactcagaaaggtaacctcctccgccacattaaactg

SEQ ID NO: 1970 - DNA, 66 bp, Synthetic construct; identical to SEQ ID NO: 1225
  source 1..66: mol_type = other DNA

SEQ ID NO: 1971 - DNA, 66 bp, Synthetic construct; identical to SEQ ID NO: 1064
  source 1..66: mol_type = other DNA

SEQ ID NO: 1972 - DNA, 66 bp, Synthetic construct; identical to SEQ ID NO: 1206
  source 1..66: mol_type = other DNA

SEQ ID NO: 1973 - DNA, 66 bp, Synthetic construct; identical to SEQ ID NO: 1261
  source 1..66: mol_type = other DNA

SEQ ID NO: 1974 - DNA, 66 bp, Synthetic construct; identical to SEQ ID NO: 1256
  source 1..66: mol_type = other DNA

SEQ ID NO: 1975 - DNA, 66 bp, Synthetic construct; identical to SEQ ID NO: 1238
  source 1..66: mol_type = other DNA

SEQ ID NO: 1976 - DNA, 66 bp, Synthetic construct
  source 1..66: mol_type = other DNA
ttctggtgtaacgtgtgtggggcacactttactcagaaaggtaacctcctccgccacattaaactg

SEQ ID NO: 1977 - DNA, 66 bp, Synthetic construct; identical to SEQ ID NO: 1395
  source 1..66: mol_type = other DNA

SEQ ID NO: 1978 - DNA, 66 bp, Synthetic construct; identical to SEQ ID NO: 912
  source 1..66: mol_type = other DNA

SEQ ID NO: 1979 - DNA, 66 bp, Synthetic construct; identical to SEQ ID NO: 1212
  source 1..66: mol_type = other DNA

SEQ ID NO: 1980 - DNA, 66 bp, Synthetic construct; identical to SEQ ID NO: 1725
  source 1..66: mol_type = other DNA

SEQ ID NO: 1981 - DNA, 66 bp, Synthetic construct; identical to SEQ ID NO: 725
  source 1..66: mol_type = other DNA

SEQ ID NO: 1982 - DNA, 66 bp, Synthetic construct; identical to SEQ ID NO: 1289
  source 1..66: mol_type = other DNA

SEQ ID NO: 1983 - DNA, 66 bp, Synthetic construct; identical to SEQ ID NO: 1291
  source 1..66: mol_type = other DNA

SEQ ID NO: 1984 - DNA, 66 bp, Synthetic construct; identical to SEQ ID NO: 19
  source 1..66: mol_type = other DNA

SEQ ID NO: 1985 - DNA, 66 bp, Synthetic construct; identical to SEQ ID NO: 1042
  source 1..66: mol_type = other DNA

SEQ ID NO: 1986 - DNA, 66 bp, Synthetic construct; identical to SEQ ID NO: 1427
  source 1..66: mol_type = other DNA

SEQ ID NO: 1987 - DNA, 66 bp, Synthetic construct; identical to SEQ ID NO: 1275
  source 1..66: mol_type = other DNA

SEQ ID NO: 1988 - DNA, 66 bp, Synthetic construct
  source 1..66: mol_type = other DNA
ttctggtgtgaaatttgtggggcagattttactcagaaaggtaacctcctccgccacattaaactg

SEQ ID NO: 1989 - DNA, 66 bp, Synthetic construct; identical to SEQ ID NO: 1627
  source 1..66: mol_type = other DNA

SEQ ID NO: 1990 - DNA, 66 bp, Synthetic construct
  source 1..66: mol_type = other DNA
ttctggtgtaaccagtgtggggcacaatttactcagaaaggtaacctcctccgccacattaaactg

SEQ ID NO: 1991 - DNA, 66 bp, Synthetic construct; identical to SEQ ID NO: 806
  source 1..66: mol_type = other DNA

SEQ ID NO: 1992 - DNA, 66 bp, Synthetic construct; identical to SEQ ID NO: 1464
  source 1..66: mol_type = other DNA

SEQ ID NO: 1993 - DNA, 66 bp, Synthetic construct; identical to SEQ ID NO: 459
  source 1..66: mol_type = other DNA

SEQ ID NO: 1994 - DNA, 66 bp, Synthetic construct; identical to SEQ ID NO: 1511
  source 1..66: mol_type = other DNA

SEQ ID NO: 1995 - DNA, 66 bp, Synthetic construct; identical to SEQ ID NO: 1611
  source 1..66: mol_type = other DNA

SEQ ID NO: 1996 - DNA, 66 bp, Synthetic construct; identical to SEQ ID NO: 1644
  source 1..66: mol_type = other DNA

SEQ ID NO: 1997 - DNA, 66 bp, Synthetic construct; identical to SEQ ID NO: 1571
  source 1..66: mol_type = other DNA

SEQ ID NO: 1998 - DNA, 66 bp, Synthetic construct; identical to SEQ ID NO: 757
  source 1..66: mol_type = other DNA

SEQ ID NO: 1999 - DNA, 66 bp, Synthetic construct; identical to SEQ ID NO: 603
  source 1..66: mol_type = other DNA

SEQ ID NO: 2000 - DNA, 66 bp, Synthetic construct; identical to SEQ ID NO: 1003
  source 1..66: mol_type = other DNA

SEQ ID NO: 2001 - DNA, 66 bp, Synthetic construct; identical to SEQ ID NO: 1224
  source 1..66: mol_type = other DNA

SEQ ID NO: 2002 - DNA, 66 bp, Synthetic construct; identical to SEQ ID NO: 1483
  source 1..66: mol_type = other DNA

SEQ ID NO: 2003 - DNA, 66 bp, Synthetic construct; identical to SEQ ID NO: 1262
  source 1..66: mol_type = other DNA

SEQ ID NO: 2004 - DNA, 66 bp, Synthetic construct; identical to SEQ ID NO: 1343
  source 1..66: mol_type = other DNA

SEQ ID NO: 2005 - DNA, 66 bp, Synthetic construct; identical to SEQ ID NO: 1223
  source 1..66: mol_type = other DNA

SEQ ID NO: 2006 - DNA, 66 bp, Synthetic construct; identical to SEQ ID NO: 816
  source 1..66: mol_type = other DNA

SEQ ID NO: 2007 - DNA, 66 bp, Synthetic construct; identical to SEQ ID NO: 1297
  source 1..66: mol_type = other DNA

SEQ ID NO: 2008 - DNA, 66 bp, Synthetic construct; identical to SEQ ID NO: 826
  source 1..66: mol_type = other DNA

SEQ ID NO: 2009 - DNA, 66 bp, Synthetic construct; identical to SEQ ID NO: 1066
  source 1..66: mol_type = other DNA

SEQ ID NO: 2010 - DNA, 66 bp, Synthetic construct; identical to SEQ ID NO: 1414
  source 1..66: mol_type = other DNA

SEQ ID NO: 2011 - DNA, 66 bp, Synthetic construct; identical to SEQ ID NO: 53
  source 1..66: mol_type = other DNA

SEQ ID NO: 2012 - DNA, 66 bp, Synthetic construct; identical to SEQ ID NO: 1210
  source 1..66: mol_type = other DNA

SEQ ID NO: 2013 - DNA, 66 bp, Synthetic construct; identical to SEQ ID NO: 809
  source 1..66: mol_type = other DNA

SEQ ID NO: 2014 - DNA, 66 bp, Synthetic construct; identical to SEQ ID NO: 867
  source 1..66: mol_type = other DNA

SEQ ID NO: 2015 - DNA, 66 bp, Synthetic construct; identical to SEQ ID NO: 780
  source 1..66: mol_type = other DNA

SEQ ID NO: 2016 - DNA, 66 bp, Synthetic construct; identical to SEQ ID NO: 33
  source 1..66: mol_type = other DNA

SEQ ID NO: 2017 - DNA, 66 bp, Synthetic construct
  source 1..66: mol_type = other DNA
ttctggtgtccccagtgtggggcagcttttactcagaaaggtaacctcctccgccacattaaactg

SEQ ID NO: 2018 - DNA, 66 bp, Synthetic construct; identical to SEQ ID NO: 1019
  source 1..66: mol_type = other DNA

SEQ ID NO: 2019 - DNA, 66 bp, Synthetic construct; identical to SEQ ID NO: 589
  source 1..66: mol_type = other DNA

SEQ ID NO: 2020 - DNA, 66 bp, Synthetic construct; identical to SEQ ID NO: 1388
  source 1..66: mol_type = other DNA

SEQ ID NO: 2021 - DNA, 66 bp, Synthetic construct; identical to SEQ ID NO: 1290
  source 1..66: mol_type = other DNA

SEQ ID NO: 2022 - DNA, 66 bp, Synthetic construct; identical to SEQ ID NO: 1676
  source 1..66: mol_type = other DNA

SEQ ID NO: 2023 - DNA, 66 bp, Synthetic construct; identical to SEQ ID NO: 1243
  source 1..66: mol_type = other DNA

SEQ ID NO: 2024 - DNA, 66 bp, Synthetic construct; identical to SEQ ID NO: 77
  source 1..66: mol_type = other DNA

SEQ ID NO: 2025 - DNA, 66 bp, Synthetic construct; identical to SEQ ID NO: 1069
  source 1..66: mol_type = other DNA

SEQ ID NO: 2026 - DNA, 66 bp, Synthetic construct; identical to SEQ ID NO: 935
  source 1..66: mol_type = other DNA

SEQ ID NO: 2027 - DNA, 66 bp, Synthetic construct
  source 1..66: mol_type = other DNA
ttctggtgtaatatttgtggggcaatatttactcagaaaggtaacctcctccgccacattaaactg

SEQ ID NO: 2028 - DNA, 66 bp, Synthetic construct; identical to SEQ ID NO: 1126
  source 1..66: mol_type = other DNA

SEQ ID NO: 2029 - DNA, 66 bp, Synthetic construct
  source 1..66: mol_type = other DNA
ttctattgtgatgtgtgtggggcaaactttactcagaaaggtaacctcctccgccacattaaactg

SEQ ID NO: 2030 - DNA, 66 bp, Synthetic construct
  source 1..66: mol_type = other DNA
ttctggtgtgatcaatgtggggcacagtttactcagaaaggtaacctcctccgccacattaaactg

SEQ ID NO: 2031 - DNA, 66 bp, Synthetic construct; identical to SEQ ID NO: 89
  source 1..66: mol_type = other DNA

SEQ ID NO: 2032 - DNA, 66 bp, Synthetic construct; identical to SEQ ID NO: 1098
  source 1..66: mol_type = other DNA

SEQ ID NO: 2033 - DNA, 66 bp, Synthetic construct; identical to SEQ ID NO: 1094
  source 1..66: mol_type = other DNA

SEQ ID NO: 2034 - DNA, 66 bp, Synthetic construct
  source 1..66: mol_type = other DNA
ttctggtgtaatgtgtgtggggcaacctttactcagaaaggtaacctcctccgccacattaaactg

SEQ ID NO: 2035 - DNA, 66 bp, Synthetic construct; identical to SEQ ID NO: 1737
  source 1..66: mol_type = other DNA

SEQ ID NO: 2036 - DNA, 66 bp, Synthetic construct; identical to SEQ ID NO: 1410
  source 1..66: mol_type = other DNA

SEQ ID NO: 2037 - DNA, 66 bp, Synthetic construct; identical to SEQ ID NO: 982
  source 1..66: mol_type = other DNA

SEQ ID NO: 2038 - DNA, 66 bp, Synthetic construct; identical to SEQ ID NO: 1451
  source 1..66: mol_type = other DNA

SEQ ID NO: 2039 - DNA, 66 bp, Synthetic construct; identical to SEQ ID NO: 999
  source 1..66: mol_type = other DNA

SEQ ID NO: 2040 - DNA, 66 bp, Synthetic construct; identical to SEQ ID NO: 173
  source 1..66: mol_type = other DNA

SEQ ID NO: 2041 - DNA, 66 bp, Synthetic construct
  source 1..66: mol_type = other DNA
ttctggtgtaacatatgtggggcattttttactcagaaaggtaacctcctccgccacattaaactg

SEQ ID NO: 2042 - DNA, 66 bp, Synthetic construct; identical to SEQ ID NO: 503
  source 1..66: mol_type = other DNA

SEQ ID NO: 2043 - DNA, 66 bp, Synthetic construct; identical to SEQ ID NO: 734
  source 1..66: mol_type = other DNA

SEQ ID NO: 2044 - DNA, 66 bp, Synthetic construct; identical to SEQ ID NO: 1396
  source 1..66: mol_type = other DNA

SEQ ID NO: 2045 - DNA, 66 bp, Synthetic construct; identical to SEQ ID NO: 707
  source 1..66: mol_type = other DNA

SEQ ID NO: 2046 - DNA, 66 bp, Synthetic construct; identical to SEQ ID NO: 1527
  source 1..66: mol_type = other DNA

SEQ ID NO: 2047 - DNA, 66 bp, Synthetic construct; identical to SEQ ID NO: 1030
  source 1..66: mol_type = other DNA

SEQ ID NO: 2048 - DNA, 66 bp, Synthetic construct; identical to SEQ ID NO: 1184
  source 1..66: mol_type = other DNA

SEQ ID NO: 2049 - DNA, 66 bp, Synthetic construct; identical to SEQ ID NO: 892
  source 1..66: mol_type = other DNA

SEQ ID NO: 2050 - DNA, 66 bp, Synthetic construct; identical to SEQ ID NO: 1335
  source 1..66: mol_type = other DNA

SEQ ID NO: 2051 - DNA, 66 bp, Synthetic construct; identical to SEQ ID NO: 1213
  source 1..66: mol_type = other DNA

SEQ ID NO: 2052 - DNA, 66 bp, Synthetic construct; identical to SEQ ID NO: 1635
  source 1..66: mol_type = other DNA

SEQ ID NO: 2053 - DNA, 66 bp, Synthetic construct; identical to SEQ ID NO: 1121
  source 1..66: mol_type = other DNA

SEQ ID NO: 2054 - DNA, 66 bp, Synthetic construct; identical to SEQ ID NO: 756
  source 1..66: mol_type = other DNA

SEQ ID NO: 2055 - DNA, 66 bp, Synthetic construct; identical to SEQ ID NO: 655
  source 1..66: mol_type = other DNA

SEQ ID NO: 2056 - DNA, 66 bp, Synthetic construct
  source 1..66: mol_type = other DNA
ttctggtgtgacgtgtgtggggcaatatttactcagaaaggtaacctcctccgccacattaaactg

SEQ ID NO: 2057 - DNA, 66 bp, Synthetic construct
  source 1..66: mol_type = other DNA
ttcttttgtgatgtttgtggggcaaactttactcagaaaggtaacctcctccgccacattaaactg

SEQ ID NO: 2058 - DNA, 66 bp, Synthetic construct; identical to SEQ ID NO: 1156
  source 1..66: mol_type = other DNA

SEQ ID NO: 2059 - DNA, 66 bp, Synthetic construct; identical to SEQ ID NO: 1498
  source 1..66: mol_type = other DNA

SEQ ID NO: 2060 - DNA, 66 bp, Synthetic construct; identical to SEQ ID NO: 1219
  source 1..66: mol_type = other DNA

SEQ ID NO: 2061 - DNA, 66 bp, Synthetic construct; identical to SEQ ID NO: 732
  source 1..66: mol_type = other DNA

SEQ ID NO: 2062 - DNA, 66 bp, Synthetic construct; identical to SEQ ID NO: 32
  source 1..66: mol_type = other DNA

SEQ ID NO: 2063 - DNA, 66 bp, Synthetic construct
  source 1..66: mol_type = other DNA
ttctggtgtgatatttgtggggcagaatttactcagaaaggtaacctcctccgccacattaaactg

SEQ ID NO: 2064 - DNA, 66 bp, Synthetic construct; identical to SEQ ID NO: 1476
  source 1..66: mol_type = other DNA

SEQ ID NO: 2065 - DNA, 66 bp, Synthetic construct; identical to SEQ ID NO: 417
  source 1..66: mol_type = other DNA

SEQ ID NO: 2066 - DNA, 66 bp, Synthetic construct; identical to SEQ ID NO: 177
  source 1..66: mol_type = other DNA

SEQ ID NO: 2067 - DNA, 66 bp, Synthetic construct; identical to SEQ ID NO: 1080
  source 1..66: mol_type = other DNA

SEQ ID NO: 2068 - DNA, 66 bp, Synthetic construct; identical to SEQ ID NO: 1488
  source 1..66: mol_type = other DNA

SEQ ID NO: 2069 - DNA, 66 bp, Synthetic construct; identical to SEQ ID NO: 953
  source 1..66: mol_type = other DNA

SEQ ID NO: 2070 - DNA, 66 bp, Synthetic construct
  source 1..66: mol_type = other DNA
ttctactgtgaacagtgtggggcaacctttactcagaaaggtaacctcctccgccacattaaactg

SEQ ID NO: 2071 - DNA, 66 bp, Synthetic construct; identical to SEQ ID NO: 966
  source 1..66: mol_type = other DNA

SEQ ID NO: 2072 - DNA, 66 bp, Synthetic construct
  source 1..66: mol_type = other DNA
ttctggtgtgatcagtgtggggcagcctttactcagaaaggtaacctcctccgccacattaaactg

SEQ ID NO: 2073 - DNA, 66 bp, Synthetic construct
  source 1..66: mol_type = other DNA
ttctggtgtaacgtctgtggggcacgttttactcagaaaggtaacctcctccgccacattaaactg

SEQ ID NO: 2074 - DNA, 66 bp, Synthetic construct; identical to SEQ ID NO: 1577
  source 1..66: mol_type = other DNA

SEQ ID NO: 2075 - DNA, 66 bp, Synthetic construct; identical to SEQ ID NO: 1029
  source 1..66: mol_type = other DNA

SEQ ID NO: 2076 - DNA, 66 bp, Synthetic construct; identical to SEQ ID NO: 769
  source 1..66: mol_type = other DNA

SEQ ID NO: 2077 - DNA, 66 bp, Synthetic construct; identical to SEQ ID NO: 751
  source 1..66: mol_type = other DNA

SEQ ID NO: 2078 - DNA, 66 bp, Synthetic construct; identical to SEQ ID NO: 996
  source 1..66: mol_type = other DNA

SEQ ID NO: 2079 - DNA, 66 bp, Synthetic construct
  source 1..66: mol_type = other DNA
ttctggtgtaatgtctgtggggcaatgtttactcagaaaggtaacctcctccgccacattaaactg

SEQ ID NO: 2080 - DNA, 66 bp, Synthetic construct; identical to SEQ ID NO: 201
  source 1..66: mol_type = other DNA

SEQ ID NO: 2081 - DNA, 66 bp, Synthetic construct; identical to SEQ ID NO: 1022
  source 1..66: mol_type = other DNA

SEQ ID NO: 2082 - DNA, 66 bp, Synthetic construct; identical to SEQ ID NO: 1172
  source 1..66: mol_type = other DNA

SEQ ID NO: 2083 - DNA, 66 bp, Synthetic construct; identical to SEQ ID NO: 1642
  source 1..66: mol_type = other DNA

SEQ ID NO: 2084 - DNA, 66 bp, Synthetic construct; identical to SEQ ID NO: 901
  source 1..66: mol_type = other DNA

SEQ ID NO: 2085 - DNA, 66 bp, Synthetic construct; identical to SEQ ID NO: 1024
  source 1..66: mol_type = other DNA

SEQ ID NO: 2086 - DNA, 66 bp, Synthetic construct; identical to SEQ ID NO: 778
  source 1..66: mol_type = other DNA

SEQ ID NO: 2087 - DNA, 66 bp, Synthetic construct; identical to SEQ ID NO: 1162
  source 1..66: mol_type = other DNA

SEQ ID NO: 2088 - DNA, 66 bp, Synthetic construct; identical to SEQ ID NO: 1482
  source 1..66: mol_type = other DNA

SEQ ID NO: 2089 - DNA, 66 bp, Synthetic construct; identical to SEQ ID NO: 1178
  source 1..66: mol_type = other DNA

SEQ ID NO: 2090 - DNA, 66 bp, Synthetic construct; identical to SEQ ID NO: 871
  source 1..66: mol_type = other DNA

SEQ ID NO: 2091 - DNA, 66 bp, Synthetic construct
  source 1..66: mol_type = other DNA
ttctggtgtgacgtgtgtggggcatactttactcagaaaggtaacctcctccgccacattaaactg

SEQ ID NO: 2092 - DNA, 66 bp, Synthetic construct; identical to SEQ ID NO: 1712
  source 1..66: mol_type = other DNA

SEQ ID NO: 2093 - DNA, 66 bp, Synthetic construct; identical to SEQ ID NO: 988
  source 1..66: mol_type = other DNA

SEQ ID NO: 2094 - DNA, 66 bp, Synthetic construct; identical to SEQ ID NO: 631
  source 1..66: mol_type = other DNA

SEQ ID NO: 2095 - DNA, 66 bp, Synthetic construct; identical to SEQ ID NO: 947
  source 1..66: mol_type = other DNA

SEQ ID NO: 2096 - DNA, 66 bp, Synthetic construct
  source 1..66: mol_type = other DNA
ttctggtgtaatcagtgtggggcagcatttactcagaaaggtaacctcctccgccacattaaactg

SEQ ID NO: 2097 - DNA, 66 bp, Synthetic construct; identical to SEQ ID NO: 697
  source 1..66: mol_type = other DNA

SEQ ID NO: 2098 - DNA, 66 bp, Synthetic construct; identical to SEQ ID NO: 1122
  source 1..66: mol_type = other DNA

SEQ ID NO: 2099 - DNA, 66 bp, Synthetic construct; identical to SEQ ID NO: 1145
  source 1..66: mol_type = other DNA

SEQ ID NO: 2100 - DNA, 66 bp, Synthetic construct; identical to SEQ ID NO: 1453
  source 1..66: mol_type = other DNA

SEQ ID NO: 2101 - DNA, 66 bp, Synthetic construct; identical to SEQ ID NO: 1314
  source 1..66: mol_type = other DNA

SEQ ID NO: 2102 - DNA, 66 bp, Synthetic construct; identical to SEQ ID NO: 1185
  source 1..66: mol_type = other DNA

SEQ ID NO: 2103 - DNA, 66 bp, Synthetic construct
  source 1..66: mol_type = other DNA
ttctggtgtccccagtgtggggcatgctttactcagaaaggtaacctcctccgccacattaaactg

SEQ ID NO: 2104 - DNA, 66 bp, Synthetic construct; identical to SEQ ID NO: 1049
  source 1..66: mol_type = other DNA

SEQ ID NO: 2105 - DNA, 66 bp, Synthetic construct; identical to SEQ ID NO: 1316
  source 1..66: mol_type = other DNA

SEQ ID NO: 2106 - DNA, 66 bp, Synthetic construct; identical to SEQ ID NO: 1087
  source 1..66: mol_type = other DNA

SEQ ID NO: 2107 - DNA, 66 bp, Synthetic construct; identical to SEQ ID NO: 1102
  source 1..66: mol_type = other DNA

SEQ ID NO: 2108 - DNA, 66 bp, Synthetic construct; identical to SEQ ID NO: 207
  source 1..66: mol_type = other DNA

SEQ ID NO: 2109 - DNA, 66 bp, Synthetic construct
  source 1..66: mol_type = other DNA
ttctggtgtaacatttgtggggcagaatttactcagaaaggtaacctcctccgccacattaaactg

SEQ ID NO: 2110 - DNA, 66 bp, Synthetic construct
  source 1..66: mol_type = other DNA
ttctggtgtaacgtgtgtggggcaaagtttactcagaaaggtaacctcctccgccacattaaactg

SEQ ID NO: 2111 - DNA, 66 bp, Synthetic construct; identical to SEQ ID NO: 1632
  source 1..66: mol_type = other DNA

SEQ ID NO: 2112 - DNA, 66 bp, Synthetic construct
  source 1..66: mol_type = other DNA
ttctggtgtgaccaatgtggggcatgctttactcagaaaggtaacctcctccgccacattaaactg

SEQ ID NO: 2113 - DNA, 66 bp, Synthetic construct
  source 1..66: mol_type = other DNA
ttctggtgtgaacaatgtggggcaacatttactcagaaaggtaacctcctccgccacattaaactg

SEQ ID NO: 2114 - DNA, 66 bp, Synthetic construct; identical to SEQ ID NO: 1090
  source 1..66: mol_type = other DNA

SEQ ID NO: 2115 - DNA, 66 bp, Synthetic construct; identical to SEQ ID NO: 170
  source 1..66: mol_type = other DNA

SEQ ID NO: 2116 - DNA, 66 bp, Synthetic construct; identical to SEQ ID NO: 1474
  source 1..66: mol_type = other DNA

SEQ ID NO: 2117 - DNA, 66 bp, Synthetic construct
  source 1..66: mol_type = other DNA
ttctggtgtgatgtgtgtggggcagagtttactcagaaaggtaacctcctccgccacattaaactg

SEQ ID NO: 2118 - DNA, 66 bp, Synthetic construct; identical to SEQ ID NO: 1161
  source 1..66: mol_type = other DNA

SEQ ID NO: 2119 - DNA, 66 bp, Synthetic construct
  source 1..66: mol_type = other DNA
ttctggtgtaatatatgtggggcaggttttactcagaaaggtaacctcctccgccacattaaactg

SEQ ID NO: 2120 - DNA, 66 bp, Synthetic construct; identical to SEQ ID NO: 882
  source 1..66: mol_type = other DNA

SEQ ID NO: 2121 - DNA, 66 bp, Synthetic construct; identical to SEQ ID NO: 632
  source 1..66: mol_type = other DNA

SEQ ID NO: 2122 - DNA, 66 bp, Synthetic construct; identical to SEQ ID NO: 1260
  source 1..66: mol_type = other DNA

SEQ ID NO: 2123 - DNA, 66 bp, Synthetic construct
  source 1..66: mol_type = other DNA
ttctactgtaatatttgtggggcaaactttactcagaaaggtaacctcctccgccacattaaactg

SEQ ID NO: 2124 - DNA, 66 bp, Synthetic construct; identical to SEQ ID NO: 860
  source 1..66: mol_type = other DNA

SEQ ID NO: 2125 - DNA, 66 bp, Synthetic construct; identical to SEQ ID NO: 759
  source 1..66: mol_type = other DNA

SEQ ID NO: 2126 - DNA, 66 bp, Synthetic construct; identical to SEQ ID NO: 486
  source 1..66: mol_type = other DNA

SEQ ID NO: 2127 - DNA, 66 bp, Synthetic construct; identical to SEQ ID NO: 1043
  source 1..66: mol_type = other DNA

SEQ ID NO: 2128 - DNA, 66 bp, Synthetic construct; identical to SEQ ID NO: 1491
  source 1..66: mol_type = other DNA

SEQ ID NO: 2129 - DNA, 66 bp, Synthetic construct
  source 1..66: mol_type = other DNA
ttctattgtaacatctgtggggcaacatttactcagaaaggtaacctcctccgccacattaaactg

SEQ ID NO: 2130 - DNA, 66 bp, Synthetic construct; identical to SEQ ID NO: 1032
  source 1..66: mol_type = other DNA

SEQ ID NO: 2131 - DNA, 66 bp, Synthetic construct
  source 1..66: mol_type = other DNA
ttcttctgtgaaatctgtggggcagactttactcagaaaggtaacctcctccgccacattaaactg

SEQ ID NO: 2132 - DNA, 66 bp, Synthetic construct; identical to SEQ ID NO: 451
  source 1..66: mol_type = other DNA

SEQ ID NO: 2133 - DNA, 66 bp, Synthetic construct; identical to SEQ ID NO: 1742
  source 1..66: mol_type = other DNA

SEQ ID NO: 2134 - DNA, 66 bp, Synthetic construct; identical to SEQ ID NO: 220
  source 1..66: mol_type = other DNA

SEQ ID NO: 2135 - DNA, 66 bp, Synthetic construct; identical to SEQ ID NO: 73
  source 1..66: mol_type = other DNA

SEQ ID NO: 2136 - DNA, 66 bp, Synthetic construct
  source 1..66: mol_type = other DNA
ttcttctgtgatgtttgtggggcaacttttactcagaaaggtaacctcctccgccacattaaactg

SEQ ID NO: 2137 - DNA, 66 bp, Synthetic construct; identical to SEQ ID NO: 600
  source 1..66: mol_type = other DNA

SEQ ID NO: 2138 - DNA, 66 bp, Synthetic construct
  source 1..66: mol_type = other DNA
ttctggtgtaatcagtgtggggcatgctttactcagaaaggtaacctcctccgccacattaaactg

SEQ ID NO: 2139 - DNA, 66 bp, Synthetic construct; identical to SEQ ID NO: 1041
  source 1..66: mol_type = other DNA

SEQ ID NO: 2140 - DNA, 66 bp, Synthetic construct; identical to SEQ ID NO: 930
  source 1..66: mol_type = other DNA

SEQ ID NO: 2141 - DNA, 66 bp, Synthetic construct; identical to SEQ ID NO: 843
  source 1..66: mol_type = other DNA

SEQ ID NO: 2142 - DNA, 66 bp, Synthetic construct
  source 1..66: mol_type = other DNA
ttctggtgtgaaatttgtggccgccagtttactcagaaaggtaacctcctccgccacattaaactg

SEQ ID NO: 2143 - DNA, 66 bp, Synthetic construct; identical to SEQ ID NO: 247
  source 1..66: mol_type = other DNA

SEQ ID NO: 2144 - DNA, 66 bp, Synthetic construct; identical to SEQ ID NO: 480
  source 1..66: mol_type = other DNA

SEQ ID NO: 2145 - DNA, 66 bp, Synthetic construct
  source 1..66: mol_type = other DNA
ttctattgtaacgtttgtggggcaaactttactcagaaaggtaacctcctccgccacattaaactg

SEQ ID NO: 2146 - DNA, 66 bp, Synthetic construct; identical to SEQ ID NO: 64
  source 1..66: mol_type = other DNA

SEQ ID NO: 2147 - DNA, 66 bp, Synthetic construct; identical to SEQ ID NO: 1047
  source 1..66: mol_type = other DNA

SEQ ID NO: 2148 - DNA, 66 bp, Synthetic construct; identical to SEQ ID NO: 1014
  source 1..66: mol_type = other DNA

SEQ ID NO: 2149 - DNA, 66 bp, Synthetic construct; identical to SEQ ID NO: 1299
  source 1..66: mol_type = other DNA

SEQ ID NO: 2150 - DNA, 66 bp, Synthetic construct
  source 1..66: mol_type = other DNA
ctgtattgtgagatttgcggtttctactgtactcagaaaggtaacctcctccgccacattaaactg

SEQ ID NO: 2151 - DNA, 66 bp, Synthetic construct
  source 1..66: mol_type = other DNA
ctgtggtgtgaaatctgcggcttcgagtgtactcagaaaggtaacctcctccgccacattaaactg

SEQ ID NO: 2152 - DNA, 66 bp, Synthetic construct; identical to SEQ ID NO: 1235
  source 1..66: mol_type = other DNA

SEQ ID NO: 2153 - DNA, 66 bp, Synthetic construct; identical to SEQ ID NO: 5
  source 1..66: mol_type = other DNA

SEQ ID NO: 2154 - DNA, 66 bp, Synthetic construct; identical to SEQ ID NO: 1641
  source 1..66: mol_type = other DNA

SEQ ID NO: 2155 - DNA, 66 bp, Synthetic construct
  source 1..66: mol_type = other DNA
ttttggtgtccaatatgcggccggcagtttactcagaaaggtaacctcctccgccacattaaactg

SEQ ID NO: 2156 - DNA, 66 bp, Synthetic construct; identical to SEQ ID NO: 1315
  source 1..66: mol_type = other DNA

SEQ ID NO: 2157 - DNA, 66 bp, Synthetic construct; identical to SEQ ID NO: 1363
  source 1..66: mol_type = other DNA

SEQ ID NO: 2158 - DNA, 66 bp, Synthetic construct
  source 1..66: mol_type = other DNA
ttctggtgtgaacagtgtggggcacgctttactcagaaaggtaacctcctccgccacattaaactg

SEQ ID NO: 2159 - DNA, 66 bp, Synthetic construct; identical to SEQ ID NO: 1301
  source 1..66: mol_type = other DNA

SEQ ID NO: 2160 - DNA, 66 bp, Synthetic construct; identical to SEQ ID NO: 765
  source 1..66: mol_type = other DNA

SEQ ID NO: 2161 - DNA, 66 bp, Synthetic construct; identical to SEQ ID NO: 363
  source 1..66: mol_type = other DNA

SEQ ID NO: 2162 - DNA, 66 bp, Synthetic construct
  source 1..66: mol_type = other DNA
ttctggtgtcccatttgtggggcaatctttactcagaaaggtaacctcctccgccacattaaactg

SEQ ID NO: 2163 - DNA, 66 bp, Synthetic construct; identical to SEQ ID NO: 1717
  source 1..66: mol_type = other DNA

SEQ ID NO: 2164 - DNA, 66 bp, Synthetic construct; identical to SEQ ID NO: 1127
  source 1..66: mol_type = other DNA

SEQ ID NO: 2165 - DNA, 66 bp, Synthetic construct; identical to SEQ ID NO: 1397
  source 1..66: mol_type = other DNA

SEQ ID NO: 2166 - DNA, 66 bp, Synthetic construct; identical to SEQ ID NO: 1202
  source 1..66: mol_type = other DNA

SEQ ID NO: 2167 - DNA, 66 bp, Synthetic construct
  source 1..66: mol_type = other DNA
ttctattgtgatgtttgtggggcacattttactcagaaaggtaacctcctccgccacattaaactg

SEQ ID NO: 2168 - DNA, 66 bp, Synthetic construct; identical to SEQ ID NO: 888
  source 1..66: mol_type = other DNA

SEQ ID NO: 2169 - DNA, 66 bp, Synthetic construct; identical to SEQ ID NO: 545
  source 1..66: mol_type = other DNA

SEQ ID NO: 2170 - DNA, 66 bp, Synthetic construct; identical to SEQ ID NO: 1369
  source 1..66: mol_type = other DNA

SEQ ID NO: 2171 - DNA, 66 bp, Synthetic construct; identical to SEQ ID NO: 567
  source 1..66: mol_type = other DNA

SEQ ID NO: 2172 - DNA, 66 bp, Synthetic construct
  source 1..66: mol_type = other DNA
ctgtggtgtgagatttgtggattcaattgcactcagaaaggtaacctcctccgccacattaaactg

SEQ ID NO: 2173 - DNA, 66 bp, Synthetic construct
  source 1..66: mol_type = other DNA
ttctattgtaacatctgtggggcagtctttactcagaaaggtaacctcctccgccacattaaactg

SEQ ID NO: 2174 - DNA, 66 bp, Synthetic construct; identical to SEQ ID NO: 1070
  source 1..66: mol_type = other DNA

SEQ ID NO: 2175 - DNA, 66 bp, Synthetic construct
  source 1..66: mol_type = other DNA
ttcgactgtgagatttgtggggcatgttttactcagaaaggtaacctcctccgccacattaaactg

SEQ ID NO: 2176 - DNA, 66 bp, Synthetic construct; identical to SEQ ID NO: 1557
  source 1..66: mol_type = other DNA

SEQ ID NO: 2177 - DNA, 66 bp, Synthetic construct; identical to SEQ ID NO: 884
  source 1..66: mol_type = other DNA

SEQ ID NO: 2178 - DNA, 66 bp, Synthetic construct
  source 1..66: mol_type = other DNA
ttcgattgtgaaatctgtggggcaggctttactcagaaaggtaacctcctccgccacattaaactg

SEQ ID NO: 2179 - DNA, 66 bp, Synthetic construct; identical to SEQ ID NO: 1303
  source 1..66: mol_type = other DNA

SEQ ID NO: 2180 - DNA, 66 bp, Synthetic construct; identical to SEQ ID NO: 1251
  source 1..66: mol_type = other DNA

SEQ ID NO: 2181 - DNA, 66 bp, Synthetic construct; identical to SEQ ID NO: 149
  source 1..66: mol_type = other DNA

SEQ ID NO: 2182 - DNA, 66 bp, Synthetic construct
  source 1..66: mol_type = other DNA
ttctggtgtccacaatgtggggcacattttactcagaaaggtaacctcctccgccacattaaactg

SEQ ID NO: 2183 - DNA, 66 bp, Synthetic construct; identical to SEQ ID NO: 828
  source 1..66: mol_type = other DNA

SEQ ID NO: 2184 - DNA, 66 bp, Synthetic construct; identical to SEQ ID NO: 1216
  source 1..66: mol_type = other DNA

SEQ ID NO: 2185 - DNA, 66 bp, Synthetic construct; identical to SEQ ID NO: 1633
  source 1..66: mol_type = other DNA

SEQ ID NO: 2186 - DNA, 66 bp, Synthetic construct; identical to SEQ ID NO: 1207
  source 1..66: mol_type = other DNA

SEQ ID NO: 2187 - DNA, 66 bp, Synthetic construct; identical to SEQ ID NO: 34
  source 1..66: mol_type = other DNA

SEQ ID NO: 2188 - DNA, 66 bp, Synthetic construct; identical to SEQ ID NO: 1505
  source 1..66: mol_type = other DNA

SEQ ID NO: 2189 - DNA, 66 bp, Synthetic construct; identical to SEQ ID NO: 1391
  source 1..66: mol_type = other DNA

SEQ ID NO: 2190 - DNA, 66 bp, Synthetic construct; identical to SEQ ID NO: 1590
  source 1..66: mol_type = other DNA

SEQ ID NO: 2191 - DNA, 66 bp, Synthetic construct
  source 1..66: mol_type = other DNA
ttctactgtaacatatgtggggcacattttactcagaaaggtaacctcctccgccacattaaactg

SEQ ID NO: 2192 - DNA, 66 bp, Synthetic construct
  source 1..66: mol_type = other DNA
ttctggtgtaatgtgtgtggggcagtctttactcagaaaggtaacctcctccgccacattaaactg

SEQ ID NO: 2193 - DNA, 66 bp, Synthetic construct; identical to SEQ ID NO: 162
  source 1..66: mol_type = other DNA

SEQ ID NO: 2194 - DNA, 66 bp, Synthetic construct; identical to SEQ ID NO: 1270
  source 1..66: mol_type = other DNA

SEQ ID NO: 2195 - DNA, 66 bp, Synthetic construct; identical to SEQ ID NO: 1354
  source 1..66: mol_type = other DNA

SEQ ID NO: 2196 - DNA, 66 bp, Synthetic construct; identical to SEQ ID NO: 1091
  source 1..66: mol_type = other DNA

SEQ ID NO: 2197 - DNA, 66 bp, Synthetic construct
  source 1..66: mol_type = other DNA
ttctattgtgagatctgtggggcagattttactcagaaaggtaacctcctccgccacattaaactg

SEQ ID NO: 2198 - DNA, 66 bp, Synthetic construct; identical to SEQ ID NO: 569
  source 1..66: mol_type = other DNA

SEQ ID NO: 2199 - DNA, 66 bp, Synthetic construct; identical to SEQ ID NO: 1190
  source 1..66: mol_type = other DNA

SEQ ID NO: 2200 - DNA, 66 bp, Synthetic construct; identical to SEQ ID NO: 855
  source 1..66: mol_type = other DNA

SEQ ID NO: 2201 - DNA, 66 bp, Synthetic construct; identical to SEQ ID NO: 264
  source 1..66: mol_type = other DNA

SEQ ID NO: 2202 - DNA, 66 bp, Synthetic construct; identical to SEQ ID NO: 115
  source 1..66: mol_type = other DNA

SEQ ID NO: 2203 - DNA, 66 bp, Synthetic construct; identical to SEQ ID NO: 1040
  source 1..66: mol_type = other DNA

SEQ ID NO: 2204 - DNA, 66 bp, Synthetic construct; identical to SEQ ID NO: 823
  source 1..66: mol_type = other DNA

SEQ ID NO: 2205 - DNA, 66 bp, Synthetic construct; identical to SEQ ID NO: 1560
  source 1..66: mol_type = other DNA

SEQ ID NO: 2206 - DNA, 66 bp, Synthetic construct; identical to SEQ ID NO: 1337
  source 1..66: mol_type = other DNA

SEQ ID NO: 2207 - DNA, 66 bp, Synthetic construct; identical to SEQ ID NO: 495
  source 1..66: mol_type = other DNA

SEQ ID NO: 2208 - DNA, 66 bp, Synthetic construct
  source 1..66: mol_type = other DNA
ttcgagtgtgatatctgtggggcagcctttactcagaaaggtaacctcctccgccacattaaactg

SEQ ID NO: 2209 - DNA, 66 bp, Synthetic construct; identical to SEQ ID NO: 1721
  source 1..66: mol_type = other DNA

SEQ ID NO: 2210 - DNA, 66 bp, Synthetic construct; identical to SEQ ID NO: 210
  source 1..66: mol_type = other DNA

SEQ ID NO: 2211 - DNA, 66 bp, Synthetic construct; identical to SEQ ID NO: 1444
  source 1..66: mol_type = other DNA

SEQ ID NO: 2212 - DNA, 66 bp, Synthetic construct; identical to SEQ ID NO: 1653
  source 1..66: mol_type = other DNA

SEQ ID NO: 2213 - DNA, 66 bp, Synthetic construct; identical to SEQ ID NO: 1576
  source 1..66: mol_type = other DNA

SEQ ID NO: 2214 - DNA, 66 bp, Synthetic construct; identical to SEQ ID NO: 1334
  source 1..66: mol_type = other DNA

SEQ ID NO: 2215 - DNA, 66 bp, Synthetic construct; identical to SEQ ID NO: 1257
  source 1..66: mol_type = other DNA

SEQ ID NO: 2216 - DNA, 66 bp, Synthetic construct
  source 1..66: mol_type = other DNA
ttctggtgtgaacagtgtggggcacattttactcagaaaggtaacctcctccgccacattaaactg

SEQ ID NO: 2217 - DNA, 66 bp, Synthetic construct
  source 1..66: mol_type = other DNA
ttccattgtgaggtatgtggggcacagtttactcagaaaggtaacctcctccgccacattaaactg

SEQ ID NO: 2218 - DNA, 66 bp, Synthetic construct; identical to SEQ ID NO: 686
  source 1..66: mol_type = other DNA

SEQ ID NO: 2219 - DNA, 66 bp, Synthetic construct
  source 1..66: mol_type = other DNA
ttctattgtaatgtttgtggggcagcctttactcagaaaggtaacctcctccgccacattaaactg

SEQ ID NO: 2220 - DNA, 66 bp, Synthetic construct; identical to SEQ ID NO: 1449
  source 1..66: mol_type = other DNA

SEQ ID NO: 2221 - DNA, 66 bp, Synthetic construct; identical to SEQ ID NO: 1007
  source 1..66: mol_type = other DNA

SEQ ID NO: 2222 - DNA, 66 bp, Synthetic construct
  source 1..66: mol_type = other DNA
ctgttttgcgagatctgcgggttcgagtgtactcagaaaggtaacctcctccgccacattaaactg

SEQ ID NO: 2223 - DNA, 66 bp, Synthetic construct
  source 1..66: mol_type = other DNA
ttctggtgtgaacaatgtggggcagtctttactcagaaaggtaacctcctccgccacattaaactg

SEQ ID NO: 2224 - DNA, 66 bp, Synthetic construct; identical to SEQ ID NO: 1278
  source 1..66: mol_type = other DNA

SEQ ID NO: 2225 - DNA, 66 bp, Synthetic construct; identical to SEQ ID NO: 110
  source 1..66: mol_type = other DNA

SEQ ID NO: 2226 - DNA, 66 bp, Synthetic construct; identical to SEQ ID NO: 1222
  source 1..66: mol_type = other DNA

SEQ ID NO: 2227 - DNA, 66 bp, Synthetic construct
  source 1..66: mol_type = other DNA
ttctggtgtcccgtctgtggggcagactttactcagaaaggtaacctcctccgccacattaaactg

SEQ ID NO: 2228 - DNA, 66 bp, Synthetic construct; identical to SEQ ID NO: 1141
  source 1..66: mol_type = other DNA

SEQ ID NO: 2229 - DNA, 66 bp, Synthetic construct; identical to SEQ ID NO: 704
  source 1..66: mol_type = other DNA

SEQ ID NO: 2230 - DNA, 66 bp, Synthetic construct
  source 1..66: mol_type = other DNA
ttcgagtgtgagatttgtggggcaggctttactcagaaaggtaacctcctccgccacattaaactg

SEQ ID NO: 2231 - DNA, 66 bp, Synthetic construct; identical to SEQ ID NO: 1670
  source 1..66: mol_type = other DNA

SEQ ID NO: 2232 - DNA, 66 bp, Synthetic construct
  source 1..66: mol_type = other DNA
ttctggtgtcccgtttgtggggcaatttttactcagaaaggtaacctcctccgccacattaaactg

SEQ ID NO: 2233 - DNA, 66 bp, Synthetic construct; identical to SEQ ID NO: 548
  source 1..66: mol_type = other DNA

SEQ ID NO: 2234 - DNA, 66 bp, Synthetic construct; identical to SEQ ID NO: 1408
  source 1..66: mol_type = other DNA

SEQ ID NO: 2235 - DNA, 66 bp, Synthetic construct; identical to SEQ ID NO: 1467
  source 1..66: mol_type = other DNA

SEQ ID NO: 2236 - DNA, 66 bp, Synthetic construct; identical to SEQ ID NO: 964
  source 1..66: mol_type = other DNA

SEQ ID NO: 2237 - DNA, 66 bp, Synthetic construct
  source 1..66: mol_type = other DNA
ttctggtgtccgcagtgtggggcaacgtttactcagaaaggtaacctcctccgccacattaaactg

SEQ ID NO: 2238 - DNA, 66 bp, Synthetic construct
  source 1..66: mol_type = other DNA
ttctggtgtgatcagtgtggggcacattttactcagaaaggtaacctcctccgccacattaaactg

SEQ ID NO: 2239 - DNA, 66 bp, Synthetic construct; identical to SEQ ID NO: 1762
  source 1..66: mol_type = other DNA

SEQ ID NO: 2240 - DNA, 66 bp, Synthetic construct; identical to SEQ ID NO: 987
  source 1..66: mol_type = other DNA

SEQ ID NO: 2241 - DNA, 66 bp, Synthetic construct; identical to SEQ ID NO: 1026
  source 1..66: mol_type = other DNA

SEQ ID NO: 2242 - DNA, 66 bp, Synthetic construct
  source 1..66: mol_type = other DNA
ttctggtgtaaccagtgtggggcacactttactcagaaaggtaacctcctccgccacattaaactg

SEQ ID NO: 2243 - DNA, 66 bp, Synthetic construct; identical to SEQ ID NO: 1661
  source 1..66: mol_type = other DNA

SEQ ID NO: 2244 - DNA, 66 bp, Synthetic construct; identical to SEQ ID NO: 962
  source 1..66: mol_type = other DNA

SEQ ID NO: 2245 - DNA, 66 bp, Synthetic construct; identical to SEQ ID NO: 228
  source 1..66: mol_type = other DNA

SEQ ID NO: 2246 - DNA, 66 bp, Synthetic construct
  source 1..66: mol_type = other DNA
ttctggtgtaacatctgtggggcactgtttactcagaaaggtaacctcctccgccacattaaactg

SEQ ID NO: 2247 - DNA, 66 bp, Synthetic construct; identical to SEQ ID NO: 1050
  source 1..66: mol_type = other DNA

SEQ ID NO: 2248 - DNA, 66 bp, Synthetic construct; identical to SEQ ID NO: 255
  source 1..66: mol_type = other DNA

SEQ ID NO: 2249 - DNA, 66 bp, Synthetic construct; identical to SEQ ID NO: 140
  source 1..66: mol_type = other DNA

SEQ ID NO: 2250 - DNA, 66 bp, Synthetic construct; identical to SEQ ID NO: 187
  source 1..66: mol_type = other DNA

SEQ ID NO: 2251 - DNA, 66 bp, Synthetic construct
  source 1..66: mol_type = other DNA
ttctactgtaacatctgtggggcagagtttactcagaaaggtaacctcctccgccacattaaactg

SEQ ID NO: 2252 - DNA, 66 bp, Synthetic construct
  source 1..66: mol_type = other DNA
ttctggtgtgatgtatgtggggcaggctttactcagaaaggtaacctcctccgccacattaaactg

SEQ ID NO: 2253 - DNA, 66 bp, Synthetic construct; identical to SEQ ID NO: 989
  source 1..66: mol_type = other DNA

SEQ ID NO: 2254 - DNA, 66 bp, Synthetic construct; identical to SEQ ID NO: 10
  source 1..66: mol_type = other DNA

SEQ ID NO: 2255 - DNA, 66 bp, Synthetic construct; identical to SEQ ID NO: 1119
  source 1..66: mol_type = other DNA

SEQ ID NO: 2256 - DNA, 66 bp, Synthetic construct; identical to SEQ ID NO: 1548
  source 1..66: mol_type = other DNA

SEQ ID NO: 2257 - DNA, 66 bp, Synthetic construct; identical to SEQ ID NO: 1144
  source 1..66: mol_type = other DNA

SEQ ID NO: 2258 - DNA, 66 bp, Synthetic construct; identical to SEQ ID NO: 1680
  source 1..66: mol_type = other DNA

SEQ ID NO: 2259 - DNA, 66 bp, Synthetic construct; identical to SEQ ID NO: 112
  source 1..66: mol_type = other DNA

SEQ ID NO: 2260 - DNA, 66 bp, Synthetic construct
  source 1..66: mol_type = other DNA
ttctggtgtaatgtttgtggggcaccttttactcagaaaggtaacctcctccgccacattaaactg

SEQ ID NO: 2261 - DNA, 66 bp, Synthetic construct
  source 1..66: mol_type = other DNA
ttctggtgtgatgtatgtggggcattttttactcagaaaggtaacctcctccgccacattaaactg

SEQ ID NO: 2262 - DNA, 66 bp, Synthetic construct
  source 1..66: mol_type = other DNA
ttctattgtaacgtgtgtggggcatgctttactcagaaaggtaacctcctccgccacattaaactg

SEQ ID NO: 2263 - DNA, 66 bp, Synthetic construct
  source 1..66: mol_type = other DNA
ttctggtgtgatcagtgtggggcaacctttactcagaaaggtaacctcctccgccacattaaactg

SEQ ID NO: 2264 - DNA, 66 bp, Synthetic construct; identical to SEQ ID NO: 1329
  source 1..66: mol_type = other DNA

SEQ ID NO: 2265 - DNA, 66 bp, Synthetic construct
  source 1..66: mol_type = other DNA
ttcttttgtaatatttgtggggcaaattttactcagaaaggtaacctcctccgccacattaaactg

SEQ ID NO: 2266 - DNA, 66 bp, Synthetic construct
  source 1..66: mol_type = other DNA
ttctactgtaacgtttgtggggcaagctttactcagaaaggtaacctcctccgccacattaaactg

SEQ ID NO: 2267 - DNA, 66 bp, Synthetic construct; identical to SEQ ID NO: 1648
  source 1..66: mol_type = other DNA

SEQ ID NO: 2268 - DNA, 66 bp, Synthetic construct; identical to SEQ ID NO: 877
  source 1..66: mol_type = other DNA

SEQ ID NO: 2269 - DNA, 66 bp, Synthetic construct
  source 1..66: mol_type = other DNA
ttctattgtgagcagtgtggggcagcctttactcagaaaggtaacctcctccgccacattaaactg

SEQ ID NO: 2270 - DNA, 66 bp, Synthetic construct; identical to SEQ ID NO: 1377
  source 1..66: mol_type = other DNA

SEQ ID NO: 2271 - DNA, 66 bp, Synthetic construct; identical to SEQ ID NO: 21
  source 1..66: mol_type = other DNA

SEQ ID NO: 2272 - DNA, 66 bp, Synthetic construct
  source 1..66: mol_type = other DNA
ttctactgtgagcaatgtggggcaagttttactcagaaaggtaacctcctccgccacattaaactg

SEQ ID NO: 2273 - DNA, 66 bp, Synthetic construct
  source 1..66: mol_type = other DNA
ttcgattgtgatatctgtggggcagcttttactcagaaaggtaacctcctccgccacattaaactg

SEQ ID NO: 2274 - DNA, 66 bp, Synthetic construct; identical to SEQ ID NO: 1274
  source 1..66: mol_type = other DNA

SEQ ID NO: 2275 - DNA, 66 bp, Synthetic construct; identical to SEQ ID NO: 1686
  source 1..66: mol_type = other DNA

SEQ ID NO: 2276 - DNA, 66 bp, Synthetic construct
  source 1..66: mol_type = other DNA
ttctggtgtaatgtctgtggggcatattttactcagaaaggtaacctcctccgccacattaaactg

SEQ ID NO: 2277 - DNA, 66 bp, Synthetic construct; identical to SEQ ID NO: 343
  source 1..66: mol_type = other DNA

SEQ ID NO: 2278 - DNA, 66 bp, Synthetic construct; identical to SEQ ID NO: 320
  source 1..66: mol_type = other DNA

SEQ ID NO: 2279 - DNA, 66 bp, Synthetic construct; identical to SEQ ID NO: 949
  source 1..66: mol_type = other DNA

SEQ ID NO: 2280 - DNA, 66 bp, Synthetic construct; identical to SEQ ID NO: 355
  source 1..66: mol_type = other DNA

SEQ ID NO: 2281 - DNA, 66 bp, Synthetic construct
  source 1..66: mol_type = other DNA
ttccattgtccagtgtgtggggcacaatttactcagaaaggtaacctcctccgccacattaaactg

SEQ ID NO: 2282 - DNA, 66 bp, Synthetic construct
  source 1..66: mol_type = other DNA
ttcgagtgtgaggtatgtggggcaggctttactcagaaaggtaacctcctccgccacattaaactg

SEQ ID NO: 2283 - DNA, 66 bp, Synthetic construct; identical to SEQ ID NO: 1561
  source 1..66: mol_type = other DNA

SEQ ID NO: 2284 - DNA, 66 bp, Synthetic construct
  source 1..66: mol_type = other DNA
ttcgactgtaacatctgtggggcagcatttactcagaaaggtaacctcctccgccacattaaactg

SEQ ID NO: 2285 - DNA, 66 bp, Synthetic construct; identical to SEQ ID NO: 1268
  source 1..66: mol_type = other DNA

SEQ ID NO: 2286 - DNA, 66 bp, Synthetic construct; identical to SEQ ID NO: 864
  source 1..66: mol_type = other DNA

SEQ ID NO: 2287 - DNA, 66 bp, Synthetic construct; identical to SEQ ID NO: 992
  source 1..66: mol_type = other DNA

SEQ ID NO: 2288 - DNA, 66 bp, Synthetic construct
  source 1..66: mol_type = other DNA
ttctggtgtgaagtttgtggggcagactttactcagaaaggtaacctcctccgccacattaaactg

SEQ ID NO: 2289 - DNA, 66 bp, Synthetic construct; identical to SEQ ID NO: 1575
  source 1..66: mol_type = other DNA

SEQ ID NO: 2290 - DNA, 66 bp, Synthetic construct
  source 1..66: mol_type = other DNA
ttcgactgtgagatctgtggggcaacctttactcagaaaggtaacctcctccgccacattaaactg

SEQ ID NO: 2291 - DNA, 66 bp, Synthetic construct; identical to SEQ ID NO: 288
  source 1..66: mol_type = other DNA

SEQ ID NO: 2292 - DNA, 66 bp, Synthetic construct; identical to SEQ ID NO: 1280
  source 1..66: mol_type = other DNA

SEQ ID NO: 2293 - DNA, 66 bp, Synthetic construct; identical to SEQ ID NO: 1255
  source 1..66: mol_type = other DNA

SEQ ID NO: 2294 - DNA, 66 bp, Synthetic construct; identical to SEQ ID NO: 504
  source 1..66: mol_type = other DNA

SEQ ID NO: 2295 - DNA, 66 bp, Synthetic construct; identical to SEQ ID NO: 63
  source 1..66: mol_type = other DNA

SEQ ID NO: 2296 - DNA, 66 bp, Synthetic construct
  source 1..66: mol_type = other DNA
ttctggtgtcctcaatgtggggcacgttttactcagaaaggtaacctcctccgccacattaaactg

SEQ ID NO: 2297 - DNA, 66 bp, Synthetic construct; identical to SEQ ID NO: 1768
  source 1..66: mol_type = other DNA

SEQ ID NO: 2298 - DNA, 66 bp, Synthetic construct; identical to SEQ ID NO: 151
  source 1..66: mol_type = other DNA

SEQ ID NO: 2299 - DNA, 66 bp, Synthetic construct
  source 1..66: mol_type = other DNA
ttctggtgtcccatttgtggggcactgtttactcagaaaggtaacctcctccgccacattaaactg

SEQ ID NO: 2300 - DNA, 66 bp, Synthetic construct; identical to SEQ ID NO: 48
  source 1..66: mol_type = other DNA

SEQ ID NO: 2301 - DNA, 66 bp, Synthetic construct; identical to SEQ ID NO: 1361
  source 1..66: mol_type = other DNA

SEQ ID NO: 2302 - DNA, 66 bp, Synthetic construct
  source 1..66: mol_type = other DNA
ttctattgtgatgtatgtggggcagtctttactcagaaaggtaacctcctccgccacattaaactg

SEQ ID NO: 2303 - DNA, 66 bp, Synthetic construct; identical to SEQ ID NO: 881
  source 1..66: mol_type = other DNA

SEQ ID NO: 2304 - DNA, 66 bp, Synthetic construct; identical to SEQ ID NO: 229
  source 1..66: mol_type = other DNA

SEQ ID NO: 2305 - DNA, 66 bp, Synthetic construct; identical to SEQ ID NO: 1387
  source 1..66: mol_type = other DNA

SEQ ID NO: 2306 - DNA, 66 bp, Synthetic construct; identical to SEQ ID NO: 1418
  source 1..66: mol_type = other DNA

SEQ ID NO: 2307 - DNA, 66 bp, Synthetic construct; identical to SEQ ID NO: 830
  source 1..66: mol_type = other DNA

SEQ ID NO: 2308 - DNA, 66 bp, Synthetic construct; identical to SEQ ID NO: 899
  source 1..66: mol_type = other DNA

SEQ ID NO: 2309 - DNA, 66 bp, Synthetic construct; identical to SEQ ID NO: 1532
  source 1..66: mol_type = other DNA

SEQ ID NO: 2310 - DNA, 66 bp, Synthetic construct
  source 1..66: mol_type = other DNA
ttctggtgcgaaatctgtgggcggagatttactcagaaaggtaacctcctccgccacattaaactg

SEQ ID NO: 2311 - DNA, 66 bp, Synthetic construct
  source 1..66: mol_type = other DNA
ttctggtgtgagatatgtggggcatggtttactcagaaaggtaacctcctccgccacattaaactg

SEQ ID NO: 2312 - DNA, 66 bp, Synthetic construct
  source 1..66: mol_type = other DNA
ttctggtgtccgatctgtggggcagattttactcagaaaggtaacctcctccgccacattaaactg

SEQ ID NO: 2313 - DNA, 66 bp, Synthetic construct
  source 1..66: mol_type = other DNA
ttctactgtaatgtatgtggggcacagtttactcagaaaggtaacctcctccgccacattaaactg

SEQ ID NO: 2314 - DNA, 66 bp, Synthetic construct; identical to SEQ ID NO: 37
  source 1..66: mol_type = other DNA

SEQ ID NO: 2315 - DNA, 66 bp, Synthetic construct; identical to SEQ ID NO: 1321
  source 1..66: mol_type = other DNA

SEQ ID NO: 2316 - DNA, 66 bp, Synthetic construct; identical to SEQ ID NO: 698
  source 1..66: mol_type = other DNA

SEQ ID NO: 2317 - DNA, 66 bp, Synthetic construct
  source 1..66: mol_type = other DNA
ttctactgtgaacagtgtggggcacaatttactcagaaaggtaacctcctccgccacattaaactg

SEQ ID NO: 2318 - DNA, 66 bp, Synthetic construct; identical to SEQ ID NO: 215
  source 1..66: mol_type = other DNA

SEQ ID NO: 2319 - DNA, 66 bp, Synthetic construct; identical to SEQ ID NO: 891
  source 1..66: mol_type = other DNA

SEQ ID NO: 2320 - DNA, 66 bp, Synthetic construct
  source 1..66: mol_type = other DNA
ttctggtgtgacgtgtgtggggcaccgtttactcagaaaggtaacctcctccgccacattaaactg

SEQ ID NO: 2321 - DNA, 66 bp, Synthetic construct; identical to SEQ ID NO: 1370
  source 1..66: mol_type = other DNA

SEQ ID NO: 2322 - DNA, 66 bp, Synthetic construct; identical to SEQ ID NO: 1546
  source 1..66: mol_type = other DNA

SEQ ID NO: 2323 - DNA, 66 bp, Synthetic construct; identical to SEQ ID NO: 1259
  source 1..66: mol_type = other DNA

SEQ ID NO: 2324 - DNA, 66 bp, Synthetic construct
  source 1..66: mol_type = other DNA
ttccattgtaacatttgtggggcatcatttactcagaaaggtaacctcctccgccacattaaactg

SEQ ID NO: 2325 - DNA, 66 bp, Synthetic construct; identical to SEQ ID NO: 508
  source 1..66: mol_type = other DNA

SEQ ID NO: 2326 - DNA, 66 bp, Synthetic construct
  source 1..66: mol_type = other DNA
ttcgagtgtaatatttgtggggcaccctttactcagaaaggtaacctcctccgccacattaaactg

SEQ ID NO: 2327 - DNA, 66 bp, Synthetic construct
  source 1..66: mol_type = other DNA
ttcgattgtgatatttgtggggcaagttttactcagaaaggtaacctcctccgccacattaaactg

SEQ ID NO: 2328 - DNA, 66 bp, Synthetic construct; identical to SEQ ID NO: 1194
  source 1..66: mol_type = other DNA

SEQ ID NO: 2329 - DNA, 66 bp, Synthetic construct; identical to SEQ ID NO: 1386
  source 1..66: mol_type = other DNA

SEQ ID NO: 2330 - DNA, 66 bp, Synthetic construct; identical to SEQ ID NO: 1061
  source 1..66: mol_type = other DNA

SEQ ID NO: 2331 - DNA, 66 bp, Synthetic construct
  source 1..66: mol_type = other DNA
ttctggtgtgacgtctgtggggcactgtttactcagaaaggtaacctcctccgccacattaaactg

SEQ ID NO: 2332 - DNA, 66 bp, Synthetic construct; identical to SEQ ID NO: 76
  source 1..66: mol_type = other DNA

SEQ ID NO: 2333 - DNA, 66 bp, Synthetic construct; identical to SEQ ID NO: 1100
  source 1..66: mol_type = other DNA

SEQ ID NO: 2334 - DNA, 66 bp, Synthetic construct; identical to SEQ ID NO: 552
  source 1..66: mol_type = other DNA

SEQ ID NO: 2335 - DNA, 66 bp, Synthetic construct; identical to SEQ ID NO: 1045
  source 1..66: mol_type = other DNA

SEQ ID NO: 2336 - DNA, 66 bp, Synthetic construct
  source 1..66: mol_type = other DNA
ttcgattgtgagatatgtggggcagtatttactcagaaaggtaacctcctccgccacattaaactg

SEQ ID NO: 2337 - DNA, 66 bp, Synthetic construct; identical to SEQ ID NO: 1678
  source 1..66: mol_type = other DNA

SEQ ID NO: 2338 - DNA, 66 bp, Synthetic construct; identical to SEQ ID NO: 27
  source 1..66: mol_type = other DNA

SEQ ID NO: 2339 - DNA, 66 bp, Synthetic construct; identical to SEQ ID NO: 1342
  source 1..66: mol_type = other DNA

SEQ ID NO: 2340 - DNA, 66 bp, Synthetic construct
  source 1..66: mol_type = other DNA
ttcttctgtaatatttgtggggcaacctttactcagaaaggtaacctcctccgccacattaaactg

SEQ ID NO: 2341 - DNA, 66 bp, Synthetic construct; identical to SEQ ID NO: 24
  source 1..66: mol_type = other DNA

SEQ ID NO: 2342 - DNA, 66 bp, Synthetic construct; identical to SEQ ID NO: 1359
  source 1..66: mol_type = other DNA

SEQ ID NO: 2343 - DNA, 66 bp, Synthetic construct; identical to SEQ ID NO: 1599
  source 1..66: mol_type = other DNA

SEQ ID NO: 2344 - DNA, 66 bp, Synthetic construct; identical to SEQ ID NO: 1129
  source 1..66: mol_type = other DNA

SEQ ID NO: 2345 - DNA, 66 bp, Synthetic construct; identical to SEQ ID NO: 1136
  source 1..66: mol_type = other DNA

SEQ ID NO: 2346 - DNA, 66 bp, Synthetic construct; identical to SEQ ID NO: 391
  source 1..66: mol_type = other DNA

SEQ ID NO: 2347 - DNA, 66 bp, Synthetic construct; identical to SEQ ID NO: 1338
  source 1..66: mol_type = other DNA

SEQ ID NO: 2348 - DNA, 66 bp, Synthetic construct
  source 1..66: mol_type = other DNA
ttcgattgtgaagtctgtggggcaaattttactcagaaaggtaacctcctccgccacattaaactg

SEQ ID NO: 2349 - DNA, 66 bp, Synthetic construct; identical to SEQ ID NO: 104
  source 1..66: mol_type = other DNA

SEQ ID NO: 2350 - DNA, 66 bp, Synthetic construct; identical to SEQ ID NO: 153
  source 1..66: mol_type = other DNA

SEQ ID NO: 2351 - DNA, 66 bp, Synthetic construct; identical to SEQ ID NO: 180
  source 1..66: mol_type = other DNA

SEQ ID NO: 2352 - DNA, 66 bp, Synthetic construct; identical to SEQ ID NO: 1425
  source 1..66: mol_type = other DNA

SEQ ID NO: 2353 - DNA, 66 bp, Synthetic construct
  source 1..66: mol_type = other DNA
ttctattgtccacagtgtggggcaacctttactcagaaaggtaacctcctccgccacattaaactg

SEQ ID NO: 2354 - DNA, 66 bp, Synthetic construct; identical to SEQ ID NO: 768
  source 1..66: mol_type = other DNA

SEQ ID NO: 2355 - DNA, 66 bp, Synthetic construct
  source 1..66: mol_type = other DNA
ttcgattgtgaggtatgtggggcacagtttactcagaaaggtaacctcctccgccacattaaactg

SEQ ID NO: 2356 - DNA, 66 bp, Synthetic construct; identical to SEQ ID NO: 723
  source 1..66: mol_type = other DNA

SEQ ID NO: 2357 - DNA, 66 bp, Synthetic construct; identical to SEQ ID NO: 1242
  source 1..66: mol_type = other DNA

SEQ ID NO: 2358 - DNA, 66 bp, Synthetic construct; identical to SEQ ID NO: 16
  source 1..66: mol_type = other DNA

SEQ ID NO: 2359 - DNA, 66 bp, Synthetic construct; identical to SEQ ID NO: 597
  source 1..66: mol_type = other DNA

SEQ ID NO: 2360 - DNA, 66 bp, Synthetic construct; identical to SEQ ID NO: 1171
  source 1..66: mol_type = other DNA

SEQ ID NO: 2361 - DNA, 66 bp, Synthetic construct; identical to SEQ ID NO: 1429
  source 1..66: mol_type = other DNA

SEQ ID NO: 2362 - DNA, 66 bp, Synthetic construct; identical to SEQ ID NO: 161
  source 1..66: mol_type = other DNA

SEQ ID NO: 2363 - DNA, 66 bp, Synthetic construct; identical to SEQ ID NO: 244
  source 1..66: mol_type = other DNA

SEQ ID NO: 2364 - DNA, 66 bp, Synthetic construct; identical to SEQ ID NO: 558
  source 1..66: mol_type = other DNA

SEQ ID NO: 2365 - DNA, 66 bp, Synthetic construct; identical to SEQ ID NO: 1368
  source 1..66: mol_type = other DNA

SEQ ID NO: 2366 - DNA, 66 bp, Synthetic construct; identical to SEQ ID NO: 1344
  source 1..66: mol_type = other DNA

SEQ ID NO: 2367 - DNA, 66 bp, Synthetic construct; identical to SEQ ID NO: 1697
  source 1..66: mol_type = other DNA

SEQ ID NO: 2368 - DNA, 66 bp, Synthetic construct
  source 1..66: mol_type = other DNA
ttcttctgtgagcaatgtggggcaacgtttactcagaaaggtaacctcctccgccacattaaactg

SEQ ID NO: 2369 - DNA, 66 bp, Synthetic construct; identical to SEQ ID NO: 1507
  source 1..66: mol_type = other DNA

SEQ ID NO: 2370 - DNA, 66 bp, Synthetic construct
  source 1..66: mol_type = other DNA
ttccactgtgagatctgtggggcaacctttactcagaaaggtaacctcctccgccacattaaactg

SEQ ID NO: 2371 - DNA, 66 bp, Synthetic construct
  source 1..66: mol_type = other DNA
ttctactgtgaagtgtgtggggcagattttactcagaaaggtaacctcctccgccacattaaactg

SEQ ID NO: 2372 - DNA, 66 bp, Synthetic construct
  source 1..66: mol_type = other DNA
ttcgattgtaatatatgtggggcaagctttactcagaaaggtaacctcctccgccacattaaactg

SEQ ID NO: 2373 - DNA, 66 bp, Synthetic construct; identical to SEQ ID NO: 1151
  source 1..66: mol_type = other DNA

SEQ ID NO: 2374 - DNA, 66 bp, Synthetic construct; identical to SEQ ID NO: 1188
  source 1..66: mol_type = other DNA

SEQ ID NO: 2375 - DNA, 66 bp, Synthetic construct; identical to SEQ ID NO: 1430
  source 1..66: mol_type = other DNA

SEQ ID NO: 2376 - DNA, 66 bp, Synthetic construct
  source 1..66: mol_type = other DNA
ttctcctgtaacatctgtggggcagcatttactcagaaaggtaacctcctccgccacattaaactg

SEQ ID NO: 2377 - DNA, 66 bp, Synthetic construct
  source 1..66: mol_type = other DNA
ttctggtgtaacgtgtgtggggcagagtttactcagaaaggtaacctcctccgccacattaaactg

SEQ ID NO: 2378 - DNA, 66 bp, Synthetic construct; identical to SEQ ID NO: 1401
  source 1..66: mol_type = other DNA

SEQ ID NO: 2379 - DNA, 66 bp, Synthetic construct; identical to SEQ ID NO: 863
  source 1..66: mol_type = other DNA

SEQ ID NO: 2380 - DNA, 66 bp, Synthetic construct; identical to SEQ ID NO: 817
  source 1..66: mol_type = other DNA

SEQ ID NO: 2381 - DNA, 66 bp, Synthetic construct; identical to SEQ ID NO: 879
  source 1..66: mol_type = other DNA

SEQ ID NO: 2382 - DNA, 66 bp, Synthetic construct; identical to SEQ ID NO: 87
  source 1..66: mol_type = other DNA

SEQ ID NO: 2383 - DNA, 66 bp, Synthetic construct; identical to SEQ ID NO: 1249
  source 1..66: mol_type = other DNA

SEQ ID NO: 2384 - DNA, 66 bp, Synthetic construct; identical to SEQ ID NO: 1319
  source 1..66: mol_type = other DNA

SEQ ID NO: 2385 - DNA, 66 bp, Synthetic construct; identical to SEQ ID NO: 550
  source 1..66: mol_type = other DNA

SEQ ID NO: 2386 - DNA, 66 bp, Synthetic construct; identical to SEQ ID NO: 1176
  source 1..66: mol_type = other DNA

SEQ ID NO: 2387 - DNA, 66 bp, Synthetic construct
  source 1..66: mol_type = other DNA
ctttggtgccccatctgtggttttctttgtactcagaaaggtaacctcctccgccacattaaactg

SEQ ID NO: 2388 - DNA, 66 bp, Synthetic construct; identical to SEQ ID NO: 536
  source 1..66: mol_type = other DNA

SEQ ID NO: 2389 - DNA, 66 bp, Synthetic construct; identical to SEQ ID NO: 1435
  source 1..66: mol_type = other DNA

SEQ ID NO: 2390 - DNA, 66 bp, Synthetic construct; identical to SEQ ID NO: 1013
  source 1..66: mol_type = other DNA

SEQ ID NO: 2391 - DNA, 66 bp, Synthetic construct; identical to SEQ ID NO: 1294
  source 1..66: mol_type = other DNA

SEQ ID NO: 2392 - DNA, 66 bp, Synthetic construct
  source 1..66: mol_type = other DNA
ttcttctgtaatatttgtggggcagagtttactcagaaaggtaacctcctccgccacattaaactg

SEQ ID NO: 2393 - DNA, 66 bp, Synthetic construct
  source 1..66: mol_type = other DNA
ttctggtgtaatgtgtgtggggcaatctttactcagaaaggtaacctcctccgccacattaaactg

SEQ ID NO: 2394 - DNA, 66 bp, Synthetic construct; identical to SEQ ID NO: 1360
  source 1..66: mol_type = other DNA

SEQ ID NO: 2395 - DNA, 66 bp, Synthetic construct; identical to SEQ ID NO: 270
  source 1..66: mol_type = other DNA

SEQ ID NO: 2396 - DNA, 66 bp, Synthetic construct; identical to SEQ ID NO: 29
  source 1..66: mol_type = other DNA

SEQ ID NO: 2397 - DNA, 66 bp, Synthetic construct
  source 1..66: mol_type = other DNA
ttcgactgtgagatttgtggggcagagtttactcagaaaggtaacctcctccgccacattaaactg

SEQ ID NO: 2398 - DNA, 66 bp, Synthetic construct; identical to SEQ ID NO: 57
  source 1..66: mol_type = other DNA

SEQ ID NO: 2399 - DNA, 66 bp, Synthetic construct; identical to SEQ ID NO: 1323
  source 1..66: mol_type = other DNA

SEQ ID NO: 2400 - DNA, 66 bp, Synthetic construct; identical to SEQ ID NO: 1677
  source 1..66: mol_type = other DNA

SEQ ID NO: 2401 - DNA, 66 bp, Synthetic construct
  source 1..66: mol_type = other DNA
ttcgaatgtgaggtgtgtggggcaccttttactcagaaaggtaacctcctccgccacattaaactg

SEQ ID NO: 2402 - DNA, 66 bp, Synthetic construct; identical to SEQ ID NO: 1123
  source 1..66: mol_type = other DNA

SEQ ID NO: 2403 - DNA, 66 bp, Synthetic construct
  source 1..66: mol_type = other DNA
ttccattgtgacatttgtggggcaagctttactcagaaaggtaacctcctccgccacattaaactg

SEQ ID NO: 2404 - DNA, 66 bp, Synthetic construct; identical to SEQ ID NO: 683
  source 1..66: mol_type = other DNA

SEQ ID NO: 2405 - DNA, 66 bp, Synthetic construct
  source 1..66: mol_type = other DNA
ttcgagtgtgatatctgtggggcaccgtttactcagaaaggtaacctcctccgccacattaaactg

SEQ ID NO: 2406 - DNA, 66 bp, Synthetic construct; identical to SEQ ID NO: 1217
  source 1..66: mol_type = other DNA

SEQ ID NO: 2407 - DNA, 66 bp, Synthetic construct; identical to SEQ ID NO: 630
  source 1..66: mol_type = other DNA

SEQ ID NO: 2408 - DNA, 66 bp, Synthetic construct; identical to SEQ ID NO: 202
  source 1..66: mol_type = other DNA

SEQ ID NO: 2409 - DNA, 66 bp, Synthetic construct; identical to SEQ ID NO: 421
  source 1..66: mol_type = other DNA

SEQ ID NO: 2410 - DNA, 66 bp, Synthetic construct; identical to SEQ ID NO: 136
  source 1..66: mol_type = other DNA

SEQ ID NO: 2411 - DNA, 66 bp, Synthetic construct
  source 1..66: mol_type = other DNA
ttctggtgtaacgtgtgtggggcaggctttactcagaaaggtaacctcctccgccacattaaactg

SEQ ID NO: 2412 - DNA, 66 bp, Synthetic construct; identical to SEQ ID NO: 425
  source 1..66: mol_type = other DNA

SEQ ID NO: 2413 - DNA, 66 bp, Synthetic construct
  source 1..66: mol_type = other DNA
ttctggtgtgatcaatgtggggcacgctttactcagaaaggtaacctcctccgccacattaaactg

SEQ ID NO: 2414 - DNA, 66 bp, Synthetic construct; identical to SEQ ID NO: 118
  source 1..66: mol_type = other DNA

SEQ ID NO: 2415 - DNA, 66 bp, Synthetic construct; identical to SEQ ID NO: 1493
  source 1..66: mol_type = other DNA

SEQ ID NO: 2416 - DNA, 66 bp, Synthetic construct; identical to SEQ ID NO: 1528
  source 1..66: mol_type = other DNA

SEQ ID NO: 2417 - DNA, 66 bp, Synthetic construct; identical to SEQ ID NO: 1228
  source 1..66: mol_type = other DNA

SEQ ID NO: 2418 - DNA, 66 bp, Synthetic construct; identical to SEQ ID NO: 824
  source 1..66: mol_type = other DNA

SEQ ID NO: 2419 - DNA, 66 bp, Synthetic construct
  source 1..66: mol_type = other DNA
ttctattgtccgcagtgtggggcatcctttactcagaaaggtaacctcctccgccacattaaactg

SEQ ID NO: 2420 - DNA, 66 bp, Synthetic construct; identical to SEQ ID NO: 1500
  source 1..66: mol_type = other DNA

SEQ ID NO: 2421 - DNA, 66 bp, Synthetic construct; identical to SEQ ID NO: 563
  source 1..66: mol_type = other DNA

SEQ ID NO: 2422 - DNA, 66 bp, Synthetic construct
  source 1..66: mol_type = other DNA
ttctcgtgtgacatctgtggggcaacttttactcagaaaggtaacctcctccgccacattaaactg

SEQ ID NO: 2423 - DNA, 66 bp, Synthetic construct
  source 1..66: mol_type = other DNA
ctgtggtgtaaccagtgcggcttttcctgtactcagaaaggtaacctcctccgccacattaaactg

SEQ ID NO: 2424 - DNA, 66 bp, Synthetic construct; identical to SEQ ID NO: 79
  source 1..66: mol_type = other DNA

SEQ ID NO: 2425 - DNA, 66 bp, Synthetic construct; identical to SEQ ID NO: 418
  source 1..66: mol_type = other DNA

SEQ ID NO: 2426 - DNA, 66 bp, Synthetic construct; identical to SEQ ID NO: 804
  source 1..66: mol_type = other DNA

SEQ ID NO: 2427 - DNA, 66 bp, Synthetic construct; identical to SEQ ID NO: 1331
  source 1..66: mol_type = other DNA

SEQ ID NO: 2428 - DNA, 66 bp, Synthetic construct; identical to SEQ ID NO: 1324
  source 1..66: mol_type = other DNA

SEQ ID NO: 2429 - DNA, 66 bp, Synthetic construct; identical to SEQ ID NO: 203
  source 1..66: mol_type = other DNA

SEQ ID NO: 2430 - DNA, 66 bp, Synthetic construct; identical to SEQ ID NO: 485
  source 1..66: mol_type = other DNA

SEQ ID NO: 2431 - DNA, 66 bp, Synthetic construct; identical to SEQ ID NO: 1442
  source 1..66: mol_type = other DNA

SEQ ID NO: 2432 - DNA, 66 bp, Synthetic construct
  source 1..66: mol_type = other DNA
ttctgttgtaatatctgtggggcagcctttactcagaaaggtaacctcctccgccacattaaactg

SEQ ID NO: 2433 - DNA, 66 bp, Synthetic construct
  source 1..66: mol_type = other DNA
ttcgaatgtgatatttgtggggcatcttttactcagaaaggtaacctcctccgccacattaaactg

SEQ ID NO: 2434 - DNA, 66 bp, Synthetic construct; identical to SEQ ID NO: 1459
  source 1..66: mol_type = other DNA

SEQ ID NO: 2435 - DNA, 66 bp, Synthetic construct
  source 1..66: mol_type = other DNA
ttctggtgtccacagtgtggggcaaagtttactcagaaaggtaacctcctccgccacattaaactg

SEQ ID NO: 2436 - DNA, 66 bp, Synthetic construct; identical to SEQ ID NO: 143
  source 1..66: mol_type = other DNA

SEQ ID NO: 2437 - DNA, 66 bp, Synthetic construct
  source 1..66: mol_type = other DNA
ttcttctgtaacgtttgtggggcaagctttactcagaaaggtaacctcctccgccacattaaactg

SEQ ID NO: 2438 - DNA, 66 bp, Synthetic construct; identical to SEQ ID NO: 410
  source 1..66: mol_type = other DNA

SEQ ID NO: 2439 - DNA, 66 bp, Synthetic construct
  source 1..66: mol_type = other DNA
ttcgactgtgatatctgtggggcaagatttactcagaaaggtaacctcctccgccacattaaactg

SEQ ID NO: 2440 - DNA, 66 bp, Synthetic construct; identical to SEQ ID NO: 1513
  source 1..66: mol_type = other DNA

SEQ ID NO: 2441 - DNA, 66 bp, Synthetic construct
  source 1..66: mol_type = other DNA
ttctggtgtaaccagtgtggggcaacatttactcagaaaggtaacctcctccgccacattaaactg

SEQ ID NO: 2442 - DNA, 66 bp, Synthetic construct; identical to SEQ ID NO: 189
  source 1..66: mol_type = other DNA

SEQ ID NO: 2443 - DNA, 66 bp, Synthetic construct; identical to SEQ ID NO: 1198
  source 1..66: mol_type = other DNA

SEQ ID NO: 2444 - DNA, 66 bp, Synthetic construct; identical to SEQ ID NO: 67
  source 1..66: mol_type = other DNA

SEQ ID NO: 2445 - DNA, 66 bp, Synthetic construct
  source 1..66: mol_type = other DNA
ttcatttgtgatgtctgtggggcaccctttactcagaaaggtaacctcctccgccacattaaactg

SEQ ID NO: 2446 - DNA, 66 bp, Synthetic construct
  source 1..66: mol_type = other DNA
ttctattgtaacgtctgtggggcaacctttactcagaaaggtaacctcctccgccacattaaactg

SEQ ID NO: 2447 - DNA, 66 bp, Synthetic construct; identical to SEQ ID NO: 627
  source 1..66: mol_type = other DNA

SEQ ID NO: 2448 - DNA, 66 bp, Synthetic construct; identical to SEQ ID NO: 1479
  source 1..66: mol_type = other DNA

SEQ ID NO: 2449 - DNA, 66 bp, Synthetic construct; identical to SEQ ID NO: 1448
  source 1..66: mol_type = other DNA

SEQ ID NO: 2450 - DNA, 66 bp, Synthetic construct; identical to SEQ ID NO: 1037
  source 1..66: mol_type = other DNA

SEQ ID NO: 2451 - DNA, 66 bp, Synthetic construct
  source 1..66: mol_type = other DNA
ttctggtgtgagcagtgtggggcaatgtttactcagaaaggtaacctcctccgccacattaaactg

SEQ ID NO: 2452 - DNA, 66 bp, Synthetic construct; identical to SEQ ID NO: 242
  source 1..66: mol_type = other DNA

SEQ ID NO: 2453 - DNA, 66 bp, Synthetic construct; identical to SEQ ID NO: 748
  source 1..66: mol_type = other DNA

SEQ ID NO: 2454 - DNA, 66 bp, Synthetic construct; identical to SEQ ID NO: 980
  source 1..66: mol_type = other DNA

SEQ ID NO: 2455 - DNA, 66 bp, Synthetic construct; identical to SEQ ID NO: 68
  source 1..66: mol_type = other DNA

SEQ ID NO: 2456 - DNA, 66 bp, Synthetic construct; identical to SEQ ID NO: 570
  source 1..66: mol_type = other DNA

SEQ ID NO: 2457 - DNA, 66 bp, Synthetic construct; identical to SEQ ID NO: 1035
  source 1..66: mol_type = other DNA

SEQ ID NO: 2458 - DNA, 66 bp, Synthetic construct; identical to SEQ ID NO: 822
  source 1..66: mol_type = other DNA

SEQ ID NO: 2459 - DNA, 66 bp, Synthetic construct
  source 1..66: mol_type = other DNA
ttccactgtaatatttgtggggcagcctttactcagaaaggtaacctcctccgccacattaaactg

SEQ ID NO: 2460 - DNA, 66 bp, Synthetic construct; identical to SEQ ID NO: 1347
  source 1..66: mol_type = other DNA

SEQ ID NO: 2461 - DNA, 66 bp, Synthetic construct; identical to SEQ ID NO: 147
  source 1..66: mol_type = other DNA

SEQ ID NO: 2462 - DNA, 66 bp, Synthetic construct; identical to SEQ ID NO: 243
  source 1..66: mol_type = other DNA

SEQ ID NO: 2463 - DNA, 66 bp, Synthetic construct; identical to SEQ ID NO: 176
  source 1..66: mol_type = other DNA

SEQ ID NO: 2464 - DNA, 66 bp, Synthetic construct; identical to SEQ ID NO: 932
  source 1..66: mol_type = other DNA

SEQ ID NO: 2465 - DNA, 66 bp, Synthetic construct; identical to SEQ ID NO: 30
  source 1..66: mol_type = other DNA

SEQ ID NO: 2466 - DNA, 66 bp, Synthetic construct
  source 1..66: mol_type = other DNA
ctgtggtgtaatcaatgtggttttacgtgtactcagaaaggtaacctcctccgccacattaaactg

SEQ ID NO: 2467 - DNA, 66 bp, Synthetic construct; identical to SEQ ID NO: 1244
  source 1..66: mol_type = other DNA

SEQ ID NO: 2468 - DNA, 66 bp, Synthetic construct
  source 1..66: mol_type = other DNA
ttctactgtaatatctgtggggcaaagtttactcagaaaggtaacctcctccgccacattaaactg

SEQ ID NO: 2469 - DNA, 66 bp, Synthetic construct; identical to SEQ ID NO: 1376
  source 1..66: mol_type = other DNA

SEQ ID NO: 2470 - DNA, 66 bp, Synthetic construct
  source 1..66: mol_type = other DNA
ttcttttgtccgcaatgtggggcaacctttactcagaaaggtaacctcctccgccacattaaactg

SEQ ID NO: 2471 - DNA, 66 bp, Synthetic construct; identical to SEQ ID NO: 326
  source 1..66: mol_type = other DNA

SEQ ID NO: 2472 - DNA, 66 bp, Synthetic construct
  source 1..66: mol_type = other DNA
ttcagttgtgatatatgtggggcatgttttactcagaaaggtaacctcctccgccacattaaactg

SEQ ID NO: 2473 - DNA, 66 bp, Synthetic construct
  source 1..66: mol_type = other DNA
ttcttttgtaacatttgtggggcagtttttactcagaaaggtaacctcctccgccacattaaactg

SEQ ID NO: 2474 - DNA, 66 bp, Synthetic construct; identical to SEQ ID NO: 799
  source 1..66: mol_type = other DNA

SEQ ID NO: 2475 - DNA, 66 bp, Synthetic construct; identical to SEQ ID NO: 1131
  source 1..66: mol_type = other DNA

SEQ ID NO: 2476 - DNA, 66 bp, Synthetic construct; identical to SEQ ID NO: 1553
  source 1..66: mol_type = other DNA

SEQ ID NO: 2477 - DNA, 66 bp, Synthetic construct; identical to SEQ ID NO: 281
  source 1..66: mol_type = other DNA

SEQ ID NO: 2478 - DNA, 66 bp, Synthetic construct; identical to SEQ ID NO: 218
  source 1..66: mol_type = other DNA

SEQ ID NO: 2479 - DNA, 66 bp, Synthetic construct
  source 1..66: mol_type = other DNA
ttcttttgtgatgtgtgtggggcagagtttactcagaaaggtaacctcctccgccacattaaactg

SEQ ID NO: 2480 - DNA, 66 bp, Synthetic construct; identical to SEQ ID NO: 952
  source 1..66: mol_type = other DNA

SEQ ID NO: 2481 - DNA, 66 bp, Synthetic construct; identical to SEQ ID NO: 1595
  source 1..66: mol_type = other DNA

SEQ ID NO: 2482 - DNA, 66 bp, Synthetic construct
  source 1..66: mol_type = other DNA
ttccattgtgacatttgtggggcatgctttactcagaaaggtaacctcctccgccacattaaactg

SEQ ID NO: 2483 - DNA, 66 bp, Synthetic construct; identical to SEQ ID NO: 414
  source 1..66: mol_type = other DNA

SEQ ID NO: 2484 - DNA, 66 bp, Synthetic construct; identical to SEQ ID NO: 1432
  source 1..66: mol_type = other DNA

SEQ ID NO: 2485 - DNA, 66 bp, Synthetic construct; identical to SEQ ID NO: 753
  source 1..66: mol_type = other DNA

SEQ ID NO: 2486 - DNA, 66 bp, Synthetic construct
  source 1..66: mol_type = other DNA
ttctggtgtccagtatgtggggcactgtttactcagaaaggtaacctcctccgccacattaaactg

SEQ ID NO: 2487 - DNA, 66 bp, Synthetic construct; identical to SEQ ID NO: 598
  source 1..66: mol_type = other DNA

SEQ ID NO: 2488 - DNA, 66 bp, Synthetic construct; identical to SEQ ID NO: 1153
  source 1..66: mol_type = other DNA

SEQ ID NO: 2489 - DNA, 66 bp, Synthetic construct
  source 1..66: mol_type = other DNA
ttcttttgtcctgtctgtggggcaatctttactcagaaaggtaacctcctccgccacattaaactg

SEQ ID NO: 2490 - DNA, 66 bp, Synthetic construct
  source 1..66: mol_type = other DNA
ttctactgtccccagtgtggggcacagtttactcagaaaggtaacctcctccgccacattaaactg

SEQ ID NO: 2491 - DNA, 66 bp, Synthetic construct; identical to SEQ ID NO: 1241
  source 1..66: mol_type = other DNA

SEQ ID NO: 2492 - DNA, 66 bp, Synthetic construct
  source 1..66: mol_type = other DNA
ttttggtgcgagatttgcggcagatatttcactcagaaaggtaacctcctccgccacattaaactg

SEQ ID NO: 2493 - DNA, 66 bp, Synthetic construct
  source 1..66: mol_type = other DNA
ttctattgtaacatctgtggggcatattttactcagaaaggtaacctcctccgccacattaaactg

SEQ ID NO: 2494 - DNA, 66 bp, Synthetic construct
  source 1..66: mol_type = other DNA
ttttggtgcgagatctgtggccgattatttactcagaaaggtaacctcctccgccacattaaactg

SEQ ID NO: 2495 - DNA, 66 bp, Synthetic construct; identical to SEQ ID NO: 211
  source 1..66: mol_type = other DNA

SEQ ID NO: 2496 - DNA, 66 bp, Synthetic construct
  source 1..66: mol_type = other DNA
ttccattgtccaatttgtggggcaaactttactcagaaaggtaacctcctccgccacattaaactg

SEQ ID NO: 2497 - DNA, 66 bp, Synthetic construct; identical to SEQ ID NO: 70
  source 1..66: mol_type = other DNA

SEQ ID NO: 2498 - DNA, 66 bp, Synthetic construct; identical to SEQ ID NO: 510
  source 1..66: mol_type = other DNA

SEQ ID NO: 2499 - DNA, 66 bp, Synthetic construct
  source 1..66: mol_type = other DNA
ttcttctgtgatgtgtgtggggcagtgtttactcagaaaggtaacctcctccgccacattaaactg

SEQ ID NO: 2500 - DNA, 66 bp, Synthetic construct
  source 1..66: mol_type = other DNA
ttctggtgtaatgtgtgtggggcactgtttactcagaaaggtaacctcctccgccacattaaactg

SEQ ID NO: 2501 - DNA, 66 bp, Synthetic construct; identical to SEQ ID NO: 190
  source 1..66: mol_type = other DNA

SEQ ID NO: 2502 - DNA, 66 bp, Synthetic construct; identical to SEQ ID NO: 837
  source 1..66: mol_type = other DNA

SEQ ID NO: 2503 - DNA, 66 bp, Synthetic construct; identical to SEQ ID NO: 165
  source 1..66: mol_type = other DNA

SEQ ID NO: 2504 - DNA, 66 bp, Synthetic construct; identical to SEQ ID NO: 1160
  source 1..66: mol_type = other DNA

SEQ ID NO: 2505 - DNA, 66 bp, Synthetic construct
  source 1..66: mol_type = other DNA
ttccattgtgaagtgtgtggggcaacttttactcagaaaggtaacctcctccgccacattaaactg

SEQ ID NO: 2506 - DNA, 66 bp, Synthetic construct; identical to SEQ ID NO: 611
  source 1..66: mol_type = other DNA

SEQ ID NO: 2507 - DNA, 66 bp, Synthetic construct
  source 1..66: mol_type = other DNA
ttcgagtgtgatgtgtgtggggcagcatttactcagaaaggtaacctcctccgccacattaaactg

SEQ ID NO: 2508 - DNA, 66 bp, Synthetic construct
  source 1..66: mol_type = other DNA
ttcgaatgtaacatttgtggggcatcatttactcagaaaggtaacctcctccgccacattaaactg

SEQ ID NO: 2509 - DNA, 66 bp, Synthetic construct; identical to SEQ ID NO: 1586
  source 1..66: mol_type = other DNA

SEQ ID NO: 2510 - DNA, 66 bp, Synthetic construct
  source 1..66: mol_type = other DNA
ttctggtgtaaccagtgtggggcaagatttactcagaaaggtaacctcctccgccacattaaactg

SEQ ID NO: 2511 - DNA, 66 bp, Synthetic construct; identical to SEQ ID NO: 28
  source 1..66: mol_type = other DNA

SEQ ID NO: 2512 - DNA, 66 bp, Synthetic construct; identical to SEQ ID NO: 1428
  source 1..66: mol_type = other DNA

SEQ ID NO: 2513 - DNA, 66 bp, Synthetic construct; identical to SEQ ID NO: 1192
  source 1..66: mol_type = other DNA

SEQ ID NO: 2514 - DNA, 66 bp, Synthetic construct; identical to SEQ ID NO: 389
  source 1..66: mol_type = other DNA

SEQ ID NO: 2515 - DNA, 66 bp, Synthetic construct; identical to SEQ ID NO: 200
  source 1..66: mol_type = other DNA

SEQ ID NO: 2516 - DNA, 66 bp, Synthetic construct
  source 1..66: mol_type = other DNA
ttcgattgtgaaatttgtggggcaatgtttactcagaaaggtaacctcctccgccacattaaactg

SEQ ID NO: 2517 - DNA, 66 bp, Synthetic construct
  source 1..66: mol_type = other DNA
ttctggtgtgatatttgtggggcagactttactcagaaaggtaacctcctccgccacattaaactg

SEQ ID NO: 2518 - DNA, 66 bp, Synthetic construct
  source 1..66: mol_type = other DNA
ttcgactgtgaagtttgtggggcaacctttactcagaaaggtaacctcctccgccacattaaactg

SEQ ID NO: 2519 - DNA, 66 bp, Synthetic construct; identical to SEQ ID NO: 617
  source 1..66: mol_type = other DNA

SEQ ID NO: 2520 - DNA, 66 bp, Synthetic construct
  source 1..66: mol_type = other DNA
ttctggtgtaacgtgtgtggggcattctttactcagaaaggtaacctcctccgccacattaaactg

SEQ ID NO: 2521 - DNA, 66 bp, Synthetic construct
  source 1..66: mol_type = other DNA
ttccactgtgaaatctgtggggcagtgtttactcagaaaggtaacctcctccgccacattaaactg

SEQ ID NO: 2522 - DNA, 66 bp, Synthetic construct
  source 1..66: mol_type = other DNA
ttcgaatgtgaaatttgtggggcatactttactcagaaaggtaacctcctccgccacattaaactg

SEQ ID NO: 2523 - DNA, 66 bp, Synthetic construct
  source 1..66: mol_type = other DNA
ttctattgtccacaatgtggggcaaattttactcagaaaggtaacctcctccgccacattaaactg

SEQ ID NO: 2524 - DNA, 66 bp, Synthetic construct
  source 1..66: mol_type = other DNA
ttcgattgtgaggtatgtggggcatgttttactcagaaaggtaacctcctccgccacattaaactg

SEQ ID NO: 2525 - DNA, 66 bp, Synthetic construct; identical to SEQ ID NO: 231
  source 1..66: mol_type = other DNA

SEQ ID NO: 2526 - DNA, 66 bp, Synthetic construct; identical to SEQ ID NO: 483
  source 1..66: mol_type = other DNA

SEQ ID NO: 2527 - DNA, 66 bp, Synthetic construct
  source 1..66: mol_type = other DNA
ttcgattgtgaggtgtgtggggcaggatttactcagaaaggtaacctcctccgccacattaaactg

SEQ ID NO: 2528 - DNA, 66 bp, Synthetic construct
  source 1..66: mol_type = other DNA
ttcttctgtgaggtgtgtggggcagactttactcagaaaggtaacctcctccgccacattaaactg

SEQ ID NO: 2529 - DNA, 66 bp, Synthetic construct; identical to SEQ ID NO: 1539
  source 1..66: mol_type = other DNA

SEQ ID NO: 2530 - DNA, 66 bp, Synthetic construct
  source 1..66: mol_type = other DNA
ttctactgtaatgtgtgtggggcacactttactcagaaaggtaacctcctccgccacattaaactg

SEQ ID NO: 2531 - DNA, 66 bp, Synthetic construct
  source 1..66: mol_type = other DNA
ttcgattgtgacatatgtggggcatgctttactcagaaaggtaacctcctccgccacattaaactg

SEQ ID NO: 2532 - DNA, 66 bp, Synthetic construct
  source 1..66: mol_type = other DNA
ctattctgcgagatctgtgggttcaattgcactcagaaaggtaacctcctccgccacattaaactg

SEQ ID NO: 2533 - DNA, 66 bp, Synthetic construct; identical to SEQ ID NO: 399
  source 1..66: mol_type = other DNA

SEQ ID NO: 2534 - DNA, 66 bp, Synthetic construct; identical to SEQ ID NO: 998
  source 1..66: mol_type = other DNA

SEQ ID NO: 2535 - DNA, 66 bp, Synthetic construct; identical to SEQ ID NO: 1305
  source 1..66: mol_type = other DNA

SEQ ID NO: 2536 - DNA, 66 bp, Synthetic construct; identical to SEQ ID NO: 225
  source 1..66: mol_type = other DNA

SEQ ID NO: 2537 - DNA, 66 bp, Synthetic construct
  source 1..66: mol_type = other DNA
ttttggtgtgagatatgcggacgcatgttcactcagaaaggtaacctcctccgccacattaaactg

SEQ ID NO: 2538 - DNA, 66 bp, Synthetic construct
  source 1..66: mol_type = other DNA
ttcttttgtgaacagtgtggggcaagttttactcagaaaggtaacctcctccgccacattaaactg

SEQ ID NO: 2539 - DNA, 66 bp, Synthetic construct
  source 1..66: mol_type = other DNA
ttcttctgtgaacagtgtggggcatgttttactcagaaaggtaacctcctccgccacattaaactg

SEQ ID NO: 2540 - DNA, 66 bp, Synthetic construct; identical to SEQ ID NO: 606
  source 1..66: mol_type = other DNA

SEQ ID NO: 2541 - DNA, 66 bp, Synthetic construct; identical to SEQ ID NO: 1230
  source 1..66: mol_type = other DNA

SEQ ID NO: 2542 - DNA, 66 bp, Synthetic construct
  source 1..66: mol_type = other DNA
ttttggtgtgagatctgcggccgcagcttcactcagaaaggtaacctcctccgccacattaaactg

SEQ ID NO: 2543 - DNA, 66 bp, Synthetic construct
  source 1..66: mol_type = other DNA
ttgtggtgcgagatttgtggatttctgtgtactcagaaaggtaacctcctccgccacattaaactg

SEQ ID NO: 2544 - DNA, 66 bp, Synthetic construct; identical to SEQ ID NO: 17
  source 1..66: mol_type = other DNA

SEQ ID NO: 2545 - DNA, 66 bp, Synthetic construct
  source 1..66: mol_type = other DNA
ttttggtgcgagatttgtggccgttgctttactcagaaaggtaacctcctccgccacattaaactg

SEQ ID NO: 2546 - DNA, 66 bp, Synthetic construct; identical to SEQ ID NO: 940
  source 1..66: mol_type = other DNA

SEQ ID NO: 2547 - DNA, 66 bp, Synthetic construct; identical to SEQ ID NO: 213
  source 1..66: mol_type = other DNA

SEQ ID NO: 2548 - DNA, 66 bp, Synthetic construct
  source 1..66: mol_type = other DNA
ttccactgtaacatttgtggggcacaatttactcagaaaggtaacctcctccgccacattaaactg

SEQ ID NO: 2549 - DNA, 66 bp, Synthetic construct; identical to SEQ ID NO: 260
  source 1..66: mol_type = other DNA

SEQ ID NO: 2550 - DNA, 66 bp, Synthetic construct; identical to SEQ ID NO: 102
  source 1..66: mol_type = other DNA

SEQ ID NO: 2551 - DNA, 66 bp, Synthetic construct
  source 1..66: mol_type = other DNA
ttctggtgtcctcagtgtggggcagtctttactcagaaaggtaacctcctccgccacattaaactg

SEQ ID NO: 2552 - DNA, 66 bp, Synthetic construct; identical to SEQ ID NO: 13
  source 1..66: mol_type = other DNA

SEQ ID NO: 2553 - DNA, 66 bp, Synthetic construct; identical to SEQ ID NO: 442
  source 1..66: mol_type = other DNA

SEQ ID NO: 2554 - DNA, 66 bp, Synthetic construct
  source 1..66: mol_type = other DNA
ctgtggtgtcccatttgtggtttctggtgcactcagaaaggtaacctcctccgccacattaaactg

SEQ ID NO: 2555 - DNA, 66 bp, Synthetic construct
  source 1..66: mol_type = other DNA
ctatggtgcgaaatatgtggcttctggtgcactcagaaaggtaacctcctccgccacattaaactg

SEQ ID NO: 2556 - DNA, 66 bp, Synthetic construct; identical to SEQ ID NO: 253
  source 1..66: mol_type = other DNA

SEQ ID NO: 2557 - DNA, 66 bp, Synthetic construct
  source 1..66: mol_type = other DNA
ttctactgtgagcagtgtggggcaaactttactcagaaaggtaacctcctccgccacattaaactg

SEQ ID NO: 2558 - DNA, 66 bp, Synthetic construct; identical to SEQ ID NO: 325
  source 1..66: mol_type = other DNA

SEQ ID NO: 2559 - DNA, 66 bp, Synthetic construct
  source 1..66: mol_type = other DNA
ttctggtgtgaagtgtgtggggcatggtttactcagaaaggtaacctcctccgccacattaaactg

SEQ ID NO: 2560 - DNA, 66 bp, Synthetic construct; identical to SEQ ID NO: 1011
  source 1..66: mol_type = other DNA

SEQ ID NO: 2561 - DNA, 66 bp, Synthetic construct; identical to SEQ ID NO: 137
  source 1..66: mol_type = other DNA

SEQ ID NO: 2562 - DNA, 66 bp, Synthetic construct; identical to SEQ ID NO: 232
  source 1..66: mol_type = other DNA

SEQ ID NO: 2563 - DNA, 66 bp, Synthetic construct; identical to SEQ ID NO: 374
  source 1..66: mol_type = other DNA

SEQ ID NO: 2564 - DNA, 66 bp, Synthetic construct; identical to SEQ ID NO: 20
  source 1..66: mol_type = other DNA

SEQ ID NO: 2565 - DNA, 66 bp, Synthetic construct
  source 1..66: mol_type = other DNA
ttctggtgtcctatctgtggggcatggtttactcagaaaggtaacctcctccgccacattaaactg

SEQ ID NO: 2566 - DNA, 66 bp, Synthetic construct
  source 1..66: mol_type = other DNA
ttctggtgtgatcagtgtggggcaaaatttactcagaaaggtaacctcctccgccacattaaactg

SEQ ID NO: 2567 - DNA, 66 bp, Synthetic construct; identical to SEQ ID NO: 539
  source 1..66: mol_type = other DNA

SEQ ID NO: 2568 - DNA, 66 bp, Synthetic construct; identical to SEQ ID NO: 1477
  source 1..66: mol_type = other DNA

SEQ ID NO: 2569 - DNA, 66 bp, Synthetic construct
  source 1..66: mol_type = other DNA
ttccactgtgacgtctgtggggcagcatttactcagaaaggtaacctcctccgccacattaaactg

SEQ ID NO: 2570 - DNA, 66 bp, Synthetic construct
  source 1..66: mol_type = other DNA
ttcacatgtgatatatgtggggcaagctttactcagaaaggtaacctcctccgccacattaaactg

SEQ ID NO: 2571 - DNA, 66 bp, Synthetic construct; identical to SEQ ID NO: 1177
  source 1..66: mol_type = other DNA

SEQ ID NO: 2572 - DNA, 66 bp, Synthetic construct
  source 1..66: mol_type = other DNA
ttcttctgtaatatatgtggggcacattttactcagaaaggtaacctcctccgccacattaaactg

SEQ ID NO: 2573 - DNA, 66 bp, Synthetic construct; identical to SEQ ID NO: 1579
  source 1..66: mol_type = other DNA

SEQ ID NO: 2574 - DNA, 66 bp, Synthetic construct
  source 1..66: mol_type = other DNA
ttccactgtaatatctgtggggcatgttttactcagaaaggtaacctcctccgccacattaaactg

SEQ ID NO: 2575 - DNA, 66 bp, Synthetic construct; identical to SEQ ID NO: 1320
  source 1..66: mol_type = other DNA

SEQ ID NO: 2576 - DNA, 66 bp, Synthetic construct
  source 1..66: mol_type = other DNA
ttctggtgtgagcagtgtggggcaatctttactcagaaaggtaacctcctccgccacattaaactg

SEQ ID NO: 2577 - DNA, 66 bp, Synthetic construct; identical to SEQ ID NO: 333
  source 1..66: mol_type = other DNA

SEQ ID NO: 2578 - DNA, 66 bp, Synthetic construct; identical to SEQ ID NO: 97
  source 1..66: mol_type = other DNA

SEQ ID NO: 2579 - DNA, 66 bp, Synthetic construct
  source 1..66: mol_type = other DNA
ttcttttgtgacgtgtgtggggcacattttactcagaaaggtaacctcctccgccacattaaactg

SEQ ID NO: 2580 - DNA, 66 bp, Synthetic construct
  source 1..66: mol_type = other DNA
ttttggtgtgagatctgcggccgcgtctttactcagaaaggtaacctcctccgccacattaaactg

SEQ ID NO: 2581 - DNA, 66 bp, Synthetic construct
  source 1..66: mol_type = other DNA
ttctggtgtaatcaatgtggggcaaaatttactcagaaaggtaacctcctccgccacattaaactg

SEQ ID NO: 2582 - DNA, 66 bp, Synthetic construct; identical to SEQ ID NO: 226
  source 1..66: mol_type = other DNA

SEQ ID NO: 2583 - DNA, 66 bp, Synthetic construct; identical to SEQ ID NO: 1618
  source 1..66: mol_type = other DNA

SEQ ID NO: 2584 - DNA, 66 bp, Synthetic construct
  source 1..66: mol_type = other DNA
ttcgactgtgaggtatgtggggcagtctttactcagaaaggtaacctcctccgccacattaaactg

SEQ ID NO: 2585 - DNA, 66 bp, Synthetic construct
  source 1..66: mol_type = other DNA
ttcacgtgtgacgtctgtggggcagcgtttactcagaaaggtaacctcctccgccacattaaactg

SEQ ID NO: 2586 - DNA, 66 bp, Synthetic construct; identical to SEQ ID NO: 453
  source 1..66: mol_type = other DNA

SEQ ID NO: 2587 - DNA, 66 bp, Synthetic construct
  source 1..66: mol_type = other DNA
ttctggtgtgatcagtgtggggcagtctttactcagaaaggtaacctcctccgccacattaaactg

SEQ ID NO: 2588 - DNA, 66 bp, Synthetic construct; identical to SEQ ID NO: 1601
  source 1..66: mol_type = other DNA

SEQ ID NO: 2589 - DNA, 66 bp, Synthetic construct; identical to SEQ ID NO: 849
  source 1..66: mol_type = other DNA

SEQ ID NO: 2590 - DNA, 66 bp, Synthetic construct; identical to SEQ ID NO: 814
  source 1..66: mol_type = other DNA

SEQ ID NO: 2591 - DNA, 66 bp, Synthetic construct
  source 1..66: mol_type = other DNA
ttctggtgtgagcagtgtggggcagagtttactcagaaaggtaacctcctccgccacattaaactg

SEQ ID NO: 2592 - DNA, 66 bp, Synthetic construct; identical to SEQ ID NO: 766
  source 1..66: mol_type = other DNA

SEQ ID NO: 2593 - DNA, 66 bp, Synthetic construct
  source 1..66: mol_type = other DNA
ttcgaatgtaacatctgtggggcaggttttactcagaaaggtaacctcctccgccacattaaactg

SEQ ID NO: 2594 - DNA, 66 bp, Synthetic construct; identical to SEQ ID NO: 1168
  source 1..66: mol_type = other DNA

SEQ ID NO: 2595 - DNA, 66 bp, Synthetic construct; identical to SEQ ID NO: 1086
  source 1..66: mol_type = other DNA

SEQ ID NO: 2596 - DNA, 66 bp, Synthetic construct
  source 1..66: mol_type = other DNA
ttcgtgtgtgacatctgtggggcagcctttactcagaaaggtaacctcctccgccacattaaactg

SEQ ID NO: 2597 - DNA, 66 bp, Synthetic construct
  source 1..66: mol_type = other DNA
ttctcatgtgacgtgtgtggggcagcctttactcagaaaggtaacctcctccgccacattaaactg

SEQ ID NO: 2598 - DNA, 66 bp, Synthetic construct; identical to SEQ ID NO: 1373
  source 1..66: mol_type = other DNA

SEQ ID NO: 2599 - DNA, 66 bp, Synthetic construct; identical to SEQ ID NO: 249
  source 1..66: mol_type = other DNA

SEQ ID NO: 2600 - DNA, 66 bp, Synthetic construct; identical to SEQ ID NO: 506
  source 1..66: mol_type = other DNA

SEQ ID NO: 2601 - DNA, 66 bp, Synthetic construct; identical to SEQ ID NO: 929
  source 1..66: mol_type = other DNA

SEQ ID NO: 2602 - DNA, 66 bp, Synthetic construct; identical to SEQ ID NO: 789
  source 1..66: mol_type = other DNA

SEQ ID NO: 2603 - DNA, 66 bp, Synthetic construct
  source 1..66: mol_type = other DNA
ttcgactgtgatatttgtggggcacagtttactcagaaaggtaacctcctccgccacattaaactg

SEQ ID NO: 2604 - DNA, 66 bp, Synthetic construct
  source 1..66: mol_type = other DNA
ttctactgtaatatctgtggggcactctttactcagaaaggtaacctcctccgccacattaaactg

SEQ ID NO: 2605 - DNA, 66 bp, Synthetic construct; identical to SEQ ID NO: 1340
  source 1..66: mol_type = other DNA

SEQ ID NO: 2606 - DNA, 66 bp, Synthetic construct; identical to SEQ ID NO: 338
  source 1..66: mol_type = other DNA

SEQ ID NO: 2607 - DNA, 66 bp, Synthetic construct; identical to SEQ ID NO: 182
  source 1..66: mol_type = other DNA

SEQ ID NO: 2608 - DNA, 66 bp, Synthetic construct; identical to SEQ ID NO: 889
  source 1..66: mol_type = other DNA

SEQ ID NO: 2609 - DNA, 66 bp, Synthetic construct
  source 1..66: mol_type = other DNA
ttccactgtcctatttgtggggcaacctttactcagaaaggtaacctcctccgccacattaaactg

SEQ ID NO: 2610 - DNA, 66 bp, Synthetic construct; identical to SEQ ID NO: 84
  source 1..66: mol_type = other DNA

SEQ ID NO: 2611 - DNA, 66 bp, Synthetic construct
  source 1..66: mol_type = other DNA
ttcttctgtccgatttgtggggcagattttactcagaaaggtaacctcctccgccacattaaactg

SEQ ID NO: 2612 - DNA, 66 bp, Synthetic construct; identical to SEQ ID NO: 441
  source 1..66: mol_type = other DNA

SEQ ID NO: 2613 - DNA, 66 bp, Synthetic construct; identical to SEQ ID NO: 979
  source 1..66: mol_type = other DNA

SEQ ID NO: 2614 - DNA, 66 bp, Synthetic construct
  source 1..66: mol_type = other DNA
ttctactgtgaacaatgtggggcagtctttactcagaaaggtaacctcctccgccacattaaactg

SEQ ID NO: 2615 - DNA, 66 bp, Synthetic construct
  source 1..66: mol_type = other DNA
ttccattgtcccgtctgtggggcaaactttactcagaaaggtaacctcctccgccacattaaactg

SEQ ID NO: 2616 - DNA, 66 bp, Synthetic construct
  source 1..66: mol_type = other DNA
ttcttttgtgacatctgtggggcaatgtttactcagaaaggtaacctcctccgccacattaaactg

SEQ ID NO: 2617 - DNA, 66 bp, Synthetic construct; identical to SEQ ID NO: 341
  source 1..66: mol_type = other DNA

SEQ ID NO: 2618 - DNA, 66 bp, Synthetic construct; identical to SEQ ID NO: 1147
  source 1..66: mol_type = other DNA

SEQ ID NO: 2619 - DNA, 66 bp, Synthetic construct; identical to SEQ ID NO: 1675
  source 1..66: mol_type = other DNA

SEQ ID NO: 2620 - DNA, 66 bp, Synthetic construct
  source 1..66: mol_type = other DNA
ttctactgtcctcagtgtggggcatgctttactcagaaaggtaacctcctccgccacattaaactg

SEQ ID NO: 2621 - DNA, 66 bp, Synthetic construct; identical to SEQ ID NO: 1437
  source 1..66: mol_type = other DNA

SEQ ID NO: 2622 - DNA, 66 bp, Synthetic construct; identical to SEQ ID NO: 646
  source 1..66: mol_type = other DNA

SEQ ID NO: 2623 - DNA, 66 bp, Synthetic construct; identical to SEQ ID NO: 841
  source 1..66: mol_type = other DNA

SEQ ID NO: 2624 - DNA, 66 bp, Synthetic construct
  source 1..66: mol_type = other DNA
ttttggtgtgagatttgtgggagaatcttcactcagaaaggtaacctcctccgccacattaaactg

SEQ ID NO: 2625 - DNA, 66 bp, Synthetic construct
  source 1..66: mol_type = other DNA
ttccactgtgatatctgtggggcacagtttactcagaaaggtaacctcctccgccacattaaactg

SEQ ID NO: 2626 - DNA, 66 bp, Synthetic construct; identical to SEQ ID NO: 392
  source 1..66: mol_type = other DNA

SEQ ID NO: 2627 - DNA, 66 bp, Synthetic construct; identical to SEQ ID NO: 965
  source 1..66: mol_type = other DNA

SEQ ID NO: 2628 - DNA, 66 bp, Synthetic construct; identical to SEQ ID NO: 239
  source 1..66: mol_type = other DNA

SEQ ID NO: 2629 - DNA, 66 bp, Synthetic construct; identical to SEQ ID NO: 440
  source 1..66: mol_type = other DNA

SEQ ID NO: 2630 - DNA, 66 bp, Synthetic construct
  source 1..66: mol_type = other DNA
ttttggtgtgaaatttgcggtagaaacttcactcagaaaggtaacctcctccgccacattaaactg

SEQ ID NO: 2631 - DNA, 66 bp, Synthetic construct
  source 1..66: mol_type = other DNA
ttcttctgtaatgtgtgtggggcacagtttactcagaaaggtaacctcctccgccacattaaactg

SEQ ID NO: 2632 - DNA, 66 bp, Synthetic construct; identical to SEQ ID NO: 1555
  source 1..66: mol_type = other DNA

SEQ ID NO: 2633 - DNA, 66 bp, Synthetic construct
  source 1..66: mol_type = other DNA
ttctattgtaacatctgtggggcaatctttactcagaaaggtaacctcctccgccacattaaactg

SEQ ID NO: 2634 - DNA, 66 bp, Synthetic construct; identical to SEQ ID NO: 12
  source 1..66: mol_type = other DNA

SEQ ID NO: 2635 - DNA, 66 bp, Synthetic construct; identical to SEQ ID NO: 648
  source 1..66: mol_type = other DNA

SEQ ID NO: 2636 - DNA, 66 bp, Synthetic construct; identical to SEQ ID NO: 620
  source 1..66: mol_type = other DNA

SEQ ID NO: 2637 - DNA, 66 bp, Synthetic construct
  source 1..66: mol_type = other DNA
ttcttttgtaatgtttgtggggcagcctttactcagaaaggtaacctcctccgccacattaaactg

SEQ ID NO: 2638 - DNA, 66 bp, Synthetic construct
  source 1..66: mol_type = other DNA
ttctactgtgacatttgtggggcaatatttactcagaaaggtaacctcctccgccacattaaactg

SEQ ID NO: 2639 - DNA, 66 bp, Synthetic construct
  source 1..66: mol_type = other DNA
ttctcatgtaacatctgtggggcaacttttactcagaaaggtaacctcctccgccacattaaactg

SEQ ID NO: 2640 - DNA, 66 bp, Synthetic construct; identical to SEQ ID NO: 163
  source 1..66: mol_type = other DNA

SEQ ID NO: 2641 - DNA, 66 bp, Synthetic construct; identical to SEQ ID NO: 11
  source 1..66: mol_type = other DNA

SEQ ID NO: 2642 - DNA, 66 bp, Synthetic construct
  source 1..66: mol_type = other DNA
ttttggtgtgagatttgcggaagagctttcactcagaaaggtaacctcctccgccacattaaactg

SEQ ID NO: 2643 - DNA, 66 bp, Synthetic construct
  source 1..66: mol_type = other DNA
ttctactgtgacgtatgtggggcagagtttactcagaaaggtaacctcctccgccacattaaactg

SEQ ID NO: 2644 - DNA, 66 bp, Synthetic construct; identical to SEQ ID NO: 973
  source 1..66: mol_type = other DNA

SEQ ID NO: 2645 - DNA, 66 bp, Synthetic construct; identical to SEQ ID NO: 18
  source 1..66: mol_type = other DNA

SEQ ID NO: 2646 - DNA, 66 bp, Synthetic construct
  source 1..66: mol_type = other DNA
ttttggtgtgagatttgcggccgcactttcactcagaaaggtaacctcctccgccacattaaactg

SEQ ID NO: 2647 - DNA, 66 bp, Synthetic construct; identical to SEQ ID NO: 943
  source 1..66: mol_type = other DNA

SEQ ID NO: 2648 - DNA, 66 bp, Synthetic construct
  source 1..66: mol_type = other DNA
ttcgactgtgatgtctgtggggcagcgtttactcagaaaggtaacctcctccgccacattaaactg

SEQ ID NO: 2649 - DNA, 66 bp, Synthetic construct; identical to SEQ ID NO: 1583
  source 1..66: mol_type = other DNA

SEQ ID NO: 2650 - DNA, 66 bp, Synthetic construct; identical to SEQ ID NO: 1318
  source 1..66: mol_type = other DNA

SEQ ID NO: 2651 - DNA, 66 bp, Synthetic construct; identical to SEQ ID NO: 925
  source 1..66: mol_type = other DNA

SEQ ID NO: 2652 - DNA, 66 bp, Synthetic construct; identical to SEQ ID NO: 549
  source 1..66: mol_type = other DNA

SEQ ID NO: 2653 - DNA, 66 bp, Synthetic construct; identical to SEQ ID NO: 1668
  source 1..66: mol_type = other DNA

SEQ ID NO: 2654 - DNA, 66 bp, Synthetic construct; identical to SEQ ID NO: 970
  source 1..66: mol_type = other DNA

SEQ ID NO: 2655 - DNA, 66 bp, Synthetic construct
  source 1..66: mol_type = other DNA
ttttattgtgagatctgtggcaggcaatttactcagaaaggtaacctcctccgccacattaaactg

SEQ ID NO: 2656 - DNA, 66 bp, Synthetic construct
  source 1..66: mol_type = other DNA
ttcgattgtaacatctgtggggcaaggtttactcagaaaggtaacctcctccgccacattaaactg

SEQ ID NO: 2657 - DNA, 66 bp, Synthetic construct
  source 1..66: mol_type = other DNA
ttcttctgtgagcagtgtggggcacaatttactcagaaaggtaacctcctccgccacattaaactg

SEQ ID NO: 2658 - DNA, 66 bp, Synthetic construct; identical to SEQ ID NO: 194
  source 1..66: mol_type = other DNA

SEQ ID NO: 2659 - DNA, 66 bp, Synthetic construct; identical to SEQ ID NO: 791
  source 1..66: mol_type = other DNA

SEQ ID NO: 2660 - DNA, 66 bp, Synthetic construct; identical to SEQ ID NO: 261
  source 1..66: mol_type = other DNA

SEQ ID NO: 2661 - DNA, 66 bp, Synthetic construct; identical to SEQ ID NO: 1353
  source 1..66: mol_type = other DNA

SEQ ID NO: 2662 - DNA, 66 bp, Synthetic construct; identical to SEQ ID NO: 1463
  source 1..66: mol_type = other DNA

SEQ ID NO: 2663 - DNA, 66 bp, Synthetic construct; identical to SEQ ID NO: 764
  source 1..66: mol_type = other DNA

SEQ ID NO: 2664 - DNA, 66 bp, Synthetic construct
  source 1..66: mol_type = other DNA
ttctactgtccaatttgtggggcagattttactcagaaaggtaacctcctccgccacattaaactg

SEQ ID NO: 2665 - DNA, 66 bp, Synthetic construct
  source 1..66: mol_type = other DNA
ttcttttgtaatgtctgtggggcaaactttactcagaaaggtaacctcctccgccacattaaactg

SEQ ID NO: 2666 - DNA, 66 bp, Synthetic construct
  source 1..66: mol_type = other DNA
ttctgttgtaacatttgtggggcaagctttactcagaaaggtaacctcctccgccacattaaactg

SEQ ID NO: 2667 - DNA, 66 bp, Synthetic construct; identical to SEQ ID NO: 364
  source 1..66: mol_type = other DNA

SEQ ID NO: 2668 - DNA, 66 bp, Synthetic construct; identical to SEQ ID NO: 1559
  source 1..66: mol_type = other DNA

SEQ ID NO: 2669 - DNA, 66 bp, Synthetic construct; identical to SEQ ID NO: 301
  source 1..66: mol_type = other DNA

SEQ ID NO: 2670 - DNA, 66 bp, Synthetic construct; identical to SEQ ID NO: 197
  source 1..66: mol_type = other DNA

SEQ ID NO: 2671 - DNA, 66 bp, Synthetic construct; identical to SEQ ID NO: 1541
  source 1..66: mol_type = other DNA

SEQ ID NO: 2672 - DNA, 66 bp, Synthetic construct; identical to SEQ ID NO: 857
  source 1..66: mol_type = other DNA

SEQ ID NO: 2673 - DNA, 66 bp, Synthetic construct; identical to SEQ ID NO: 1220
  source 1..66: mol_type = other DNA

SEQ ID NO: 2674 - DNA, 66 bp, Synthetic construct
  source 1..66: mol_type = other DNA
ctgtggtgcgaaatatgtggcttcgggtgtactcagaaaggtaacctcctccgccacattaaactg

SEQ ID NO: 2675 - DNA, 66 bp, Synthetic construct; identical to SEQ ID NO: 1562
  source 1..66: mol_type = other DNA

SEQ ID NO: 2676 - DNA, 66 bp, Synthetic construct; identical to SEQ ID NO: 470
  source 1..66: mol_type = other DNA

SEQ ID NO: 2677 - DNA, 66 bp, Synthetic construct
  source 1..66: mol_type = other DNA
ctggagtgcgagatctgcgggtttgcctgcactcagaaaggtaacctcctccgccacattaaactg

SEQ ID NO: 2678 - DNA, 66 bp, Synthetic construct; identical to SEQ ID NO: 164
  source 1..66: mol_type = other DNA

SEQ ID NO: 2679 - DNA, 66 bp, Synthetic construct
  source 1..66: mol_type = other DNA
ttccactgtcccatctgtggggcagtgtttactcagaaaggtaacctcctccgccacattaaactg

SEQ ID NO: 2680 - DNA, 66 bp, Synthetic construct; identical to SEQ ID NO: 329
  source 1..66: mol_type = other DNA

SEQ ID NO: 2681 - DNA, 66 bp, Synthetic construct; identical to SEQ ID NO: 679
  source 1..66: mol_type = other DNA

SEQ ID NO: 2682 - DNA, 66 bp, Synthetic construct; identical to SEQ ID NO: 322
  source 1..66: mol_type = other DNA

SEQ ID NO: 2683 - DNA, 66 bp, Synthetic construct; identical to SEQ ID NO: 336
  source 1..66: mol_type = other DNA

SEQ ID NO: 2684 - DNA, 66 bp, Synthetic construct; identical to SEQ ID NO: 1345
  source 1..66: mol_type = other DNA

SEQ ID NO: 2685 - DNA, 66 bp, Synthetic construct; identical to SEQ ID NO: 274
  source 1..66: mol_type = other DNA

SEQ ID NO: 2686 - DNA, 66 bp, Synthetic construct; identical to SEQ ID NO: 284
  source 1..66: mol_type = other DNA

SEQ ID NO: 2687 - DNA, 66 bp, Synthetic construct
  source 1..66: mol_type = other DNA
ttcgagtgtaatgtctgtggggcagcttttactcagaaaggtaacctcctccgccacattaaactg

SEQ ID NO: 2688 - DNA, 66 bp, Synthetic construct; identical to SEQ ID NO: 1134
  source 1..66: mol_type = other DNA

SEQ ID NO: 2689 - DNA, 66 bp, Synthetic construct
  source 1..66: mol_type = other DNA
ttcgactgtgaggtctgtggggcagaatttactcagaaaggtaacctcctccgccacattaaactg

SEQ ID NO: 2690 - DNA, 66 bp, Synthetic construct
  source 1..66: mol_type = other DNA
ttcttctgcgaaatctgcgggaggcagtttactcagaaaggtaacctcctccgccacattaaactg

SEQ ID NO: 2691 - DNA, 66 bp, Synthetic construct; identical to SEQ ID NO: 484
  source 1..66: mol_type = other DNA

SEQ ID NO: 2692 - DNA, 66 bp, Synthetic construct
  source 1..66: mol_type = other DNA
ttctggtgtgatatatgtggggcatggtttactcagaaaggtaacctcctccgccacattaaactg

SEQ ID NO: 2693 - DNA, 66 bp, Synthetic construct
  source 1..66: mol_type = other DNA
ttctactgcgaaatctgcggccggatttttactcagaaaggtaacctcctccgccacattaaactg

SEQ ID NO: 2694 - DNA, 66 bp, Synthetic construct; identical to SEQ ID NO: 669
  source 1..66: mol_type = other DNA

SEQ ID NO: 2695 - DNA, 66 bp, Synthetic construct; identical to SEQ ID NO: 475
  source 1..66: mol_type = other DNA

SEQ ID NO: 2696 - DNA, 66 bp, Synthetic construct; identical to SEQ ID NO: 235
  source 1..66: mol_type = other DNA

SEQ ID NO: 2697 - DNA, 66 bp, Synthetic construct; identical to SEQ ID NO: 1551
  source 1..66: mol_type = other DNA

SEQ ID NO: 2698 - DNA, 66 bp, Synthetic construct; identical to SEQ ID NO: 216
  source 1..66: mol_type = other DNA

SEQ ID NO: 2699 - DNA, 66 bp, Synthetic construct
  source 1..66: mol_type = other DNA
ttcttctgtcctgtgtgtggggcactctttactcagaaaggtaacctcctccgccacattaaactg

SEQ ID NO: 2700 - DNA, 66 bp, Synthetic construct; identical to SEQ ID NO: 1478
  source 1..66: mol_type = other DNA

SEQ ID NO: 2701 - DNA, 66 bp, Synthetic construct
  source 1..66: mol_type = other DNA
ttcttttgtaatatatgtggggcaaggtttactcagaaaggtaacctcctccgccacattaaactg

SEQ ID NO: 2702 - DNA, 66 bp, Synthetic construct; identical to SEQ ID NO: 342
  source 1..66: mol_type = other DNA

SEQ ID NO: 2703 - DNA, 66 bp, Synthetic construct; identical to SEQ ID NO: 456
  source 1..66: mol_type = other DNA

SEQ ID NO: 2704 - DNA, 66 bp, Synthetic construct; identical to SEQ ID NO: 511
  source 1..66: mol_type = other DNA

SEQ ID NO: 2705 - DNA, 66 bp, Synthetic construct
  source 1..66: mol_type = other DNA
ctatggtgtcccatctgcggtttcccttgtactcagaaaggtaacctcctccgccacattaaactg

SEQ ID NO: 2706 - DNA, 66 bp, Synthetic construct; identical to SEQ ID NO: 152
  source 1..66: mol_type = other DNA

SEQ ID NO: 2707 - DNA, 66 bp, Synthetic construct; identical to SEQ ID NO: 1603
  source 1..66: mol_type = other DNA

SEQ ID NO: 2708 - DNA, 66 bp, Synthetic construct
  source 1..66: mol_type = other DNA
ttctggtgtgaccagtgtggggcaatgtttactcagaaaggtaacctcctccgccacattaaactg

SEQ ID NO: 2709 - DNA, 66 bp, Synthetic construct; identical to SEQ ID NO: 90
  source 1..66: mol_type = other DNA

SEQ ID NO: 2710 - DNA, 66 bp, Synthetic construct; identical to SEQ ID NO: 258
  source 1..66: mol_type = other DNA

SEQ ID NO: 2711 - DNA, 66 bp, Synthetic construct; identical to SEQ ID NO: 316
  source 1..66: mol_type = other DNA

SEQ ID NO: 2712 - DNA, 66 bp, Synthetic construct; identical to SEQ ID NO: 40
  source 1..66: mol_type = other DNA

SEQ ID NO: 2713 - DNA, 66 bp, Synthetic construct; identical to SEQ ID NO: 73
  source 1..66: mol_type = other DNA

SEQ ID NO: 2714 - DNA, 66 bp, Synthetic construct; identical to SEQ ID NO: 53
  source 1..66: mol_type = other DNA

SEQ ID NO: 2715 - DNA, 66 bp, Synthetic construct; identical to SEQ ID NO: 74
  source 1..66: mol_type = other DNA

SEQ ID NO: 2716 - DNA, 66 bp, Synthetic construct; identical to SEQ ID NO: 510
  source 1..66: mol_type = other DNA

SEQ ID NO: 2717 - DNA, 66 bp, Synthetic construct; identical to SEQ ID NO: 288
  source 1..66: mol_type = other DNA

SEQ ID NO: 2718 - DNA, 66 bp, Synthetic construct; identical to SEQ ID NO: 482
  source 1..66: mol_type = other DNA

SEQ ID NO: 2719 - DNA, 66 bp, Synthetic construct; identical to SEQ ID NO: 612
  source 1..66: mol_type = other DNA

SEQ ID NO: 2720 - DNA, 66 bp, Synthetic construct; identical to SEQ ID NO: 144
  source 1..66: mol_type = other DNA

SEQ ID NO: 2721 - DNA, 66 bp, Synthetic construct; identical to SEQ ID NO: 102
  source 1..66: mol_type = other DNA

SEQ ID NO: 2722 - DNA, 66 bp, Synthetic construct; identical to SEQ ID NO: 675
  source 1..66: mol_type = other DNA

SEQ ID NO: 2723 - DNA, 66 bp, Synthetic construct; identical to SEQ ID NO: 264
  source 1..66: mol_type = other DNA

SEQ ID NO: 2724 - DNA, 66 bp, Synthetic construct; identical to SEQ ID NO: 421
  source 1..66: mol_type = other DNA

SEQ ID NO: 2725 - DNA, 66 bp, Synthetic construct; identical to SEQ ID NO: 1200
  source 1..66: mol_type = other DNA

SEQ ID NO: 2726 - DNA, 66 bp, Synthetic construct; identical to SEQ ID NO: 792
  source 1..66: mol_type = other DNA

SEQ ID NO: 2727 - DNA, 66 bp, Synthetic construct; identical to SEQ ID NO: 491
  source 1..66: mol_type = other DNA

SEQ ID NO: 2728 - DNA, 66 bp, Synthetic construct; identical to SEQ ID NO: 378
  source 1..66: mol_type = other DNA

SEQ ID NO: 2729 - DNA, 66 bp, Synthetic construct; identical to SEQ ID NO: 247
  source 1..66: mol_type = other DNA

SEQ ID NO: 2730 - DNA, 66 bp, Synthetic construct; identical to SEQ ID NO: 255
  source 1..66: mol_type = other DNA

SEQ ID NO: 2731 - DNA, 66 bp, Synthetic construct; identical to SEQ ID NO: 681
  source 1..66: mol_type = other DNA

SEQ ID NO: 2732 - DNA, 66 bp, Synthetic construct; identical to SEQ ID NO: 870
  source 1..66: mol_type = other DNA

SEQ ID NO: 2733 - DNA, 66 bp, Synthetic construct; identical to SEQ ID NO: 818
  source 1..66: mol_type = other DNA

SEQ ID NO: 2734 - DNA, 66 bp, Synthetic construct; identical to SEQ ID NO: 254
  source 1..66: mol_type = other DNA

SEQ ID NO: 2735 - DNA, 66 bp, Synthetic construct; identical to SEQ ID NO: 963
  source 1..66: mol_type = other DNA

SEQ ID NO: 2736 - DNA, 66 bp, Synthetic construct; identical to SEQ ID NO: 498
  source 1..66: mol_type = other DNA

SEQ ID NO: 2737 - DNA, 66 bp, Synthetic construct; identical to SEQ ID NO: 607
  source 1..66: mol_type = other DNA

SEQ ID NO: 2738 - DNA, 66 bp, Synthetic construct; identical to SEQ ID NO: 176
  source 1..66: mol_type = other DNA

SEQ ID NO: 2739 - DNA, 66 bp, Synthetic construct; identical to SEQ ID NO: 104
  source 1..66: mol_type = other DNA

SEQ ID NO: 2740 - DNA, 66 bp, Synthetic construct; identical to SEQ ID NO: 692
  source 1..66: mol_type = other DNA

SEQ ID NO: 2741 - DNA, 66 bp, Synthetic construct; identical to SEQ ID NO: 69
  source 1..66: mol_type = other DNA

SEQ ID NO: 2742 - DNA, 66 bp, Synthetic construct; identical to SEQ ID NO: 1359
  source 1..66: mol_type = other DNA

SEQ ID NO: 2743 - DNA, 66 bp, Synthetic construct; identical to SEQ ID NO: 89
  source 1..66: mol_type = other DNA

SEQ ID NO: 2744 - DNA, 66 bp, Synthetic construct; identical to SEQ ID NO: 189
  source 1..66: mol_type = other DNA

SEQ ID NO: 2745 - DNA, 66 bp, Synthetic construct
  source 1..66: mol_type = other DNA
ttctgttgtccggtgtgtggggcagtctttactcagaaaggtaacctcctccgccacattaaactg

SEQ ID NO: 2746 - DNA, 66 bp, Synthetic construct; identical to SEQ ID NO: 1035
  source 1..66: mol_type = other DNA

SEQ ID NO: 2747 - DNA, 66 bp, Synthetic construct; identical to SEQ ID NO: 886
  source 1..66: mol_type = other DNA

SEQ ID NO: 2748 - DNA, 66 bp, Synthetic construct
  source 1..66: mol_type = other DNA
ttcatgtgtcccatctgtggggcagattttactcagaaaggtaacctcctccgccacattaaactg

SEQ ID NO: 2749 - DNA, 66 bp, Synthetic construct; identical to SEQ ID NO: 379
  source 1..66: mol_type = other DNA

SEQ ID NO: 2750 - DNA, 66 bp, Synthetic construct; identical to SEQ ID NO: 721
  source 1..66: mol_type = other DNA

SEQ ID NO: 2751 - DNA, 66 bp, Synthetic construct; identical to SEQ ID NO: 383
  source 1..66: mol_type = other DNA

SEQ ID NO: 2752 - DNA, 66 bp, Synthetic construct; identical to SEQ ID NO: 767
  source 1..66: mol_type = other DNA

SEQ ID NO: 2753 - DNA, 66 bp, Synthetic construct; identical to SEQ ID NO: 404
  source 1..66: mol_type = other DNA

SEQ ID NO: 2754 - DNA, 66 bp, Synthetic construct; identical to SEQ ID NO: 980
  source 1..66: mol_type = other DNA

SEQ ID NO: 2755 - DNA, 66 bp, Synthetic construct; identical to SEQ ID NO: 808
  source 1..66: mol_type = other DNA

SEQ ID NO: 2756 - DNA, 66 bp, Synthetic construct; identical to SEQ ID NO: 338
  source 1..66: mol_type = other DNA

SEQ ID NO: 2757 - DNA, 66 bp, Synthetic construct; identical to SEQ ID NO: 724
  source 1..66: mol_type = other DNA

SEQ ID NO: 2758 - DNA, 66 bp, Synthetic construct; identical to SEQ ID NO: 566
  source 1..66: mol_type = other DNA

SEQ ID NO: 2759 - DNA, 66 bp, Synthetic construct
  source 1..66: mol_type = other DNA
ttcatgtgtcctgtgtgtggggcagattttactcagaaaggtaacctcctccgccacattaaactg

SEQ ID NO: 2760 - DNA, 66 bp, Synthetic construct; identical to SEQ ID NO: 145
  source 1..66: mol_type = other DNA

SEQ ID NO: 2761 - DNA, 66 bp, Synthetic construct; identical to SEQ ID NO: 93
  source 1..66: mol_type = other DNA

SEQ ID NO: 2762 - DNA, 66 bp, Synthetic construct; identical to SEQ ID NO: 642
  source 1..66: mol_type = other DNA

SEQ ID NO: 2763 - DNA, 66 bp, Synthetic construct
  source 1..66: mol_type = other DNA
ttcatgtgtccagtgtgtggggcaaattttactcagaaaggtaacctcctccgccacattaaactg

SEQ ID NO: 2764 - DNA, 66 bp, Synthetic construct; identical to SEQ ID NO: 235
  source 1..66: mol_type = other DNA

SEQ ID NO: 2765 - DNA, 66 bp, Synthetic construct; identical to SEQ ID NO: 271
  source 1..66: mol_type = other DNA

SEQ ID NO: 2766 - DNA, 66 bp, Synthetic construct; identical to SEQ ID NO: 800
  source 1..66: mol_type = other DNA

SEQ ID NO: 2767 - DNA, 66 bp, Synthetic construct; identical to SEQ ID NO: 130
  source 1..66: mol_type = other DNA

SEQ ID NO: 2768 - DNA, 66 bp, Synthetic construct; identical to SEQ ID NO: 852
  source 1..66: mol_type = other DNA

SEQ ID NO: 2769 - DNA, 66 bp, Synthetic construct; identical to SEQ ID NO: 867
  source 1..66: mol_type = other DNA

SEQ ID NO: 2770 - DNA, 66 bp, Synthetic construct; identical to SEQ ID NO: 803
  source 1..66: mol_type = other DNA

SEQ ID NO: 2771 - DNA, 66 bp, Synthetic construct; identical to SEQ ID NO: 515
  source 1..66: mol_type = other DNA

SEQ ID NO: 2772 - DNA, 66 bp, Synthetic construct; identical to SEQ ID NO: 754
  source 1..66: mol_type = other DNA

SEQ ID NO: 2773 - DNA, 66 bp, Synthetic construct
  source 1..66: mol_type = other DNA
ttcatgtgtccagtttgtggggcacaatttactcagaaaggtaacctcctccgccacattaaactg

SEQ ID NO: 2774 - DNA, 66 bp, Synthetic construct; identical to SEQ ID NO: 354
  source 1..66: mol_type = other DNA

SEQ ID NO: 2775 - DNA, 66 bp, Synthetic construct; identical to SEQ ID NO: 635
  source 1..66: mol_type = other DNA

SEQ ID NO: 2776 - DNA, 66 bp, Synthetic construct; identical to SEQ ID NO: 863
  source 1..66: mol_type = other DNA

SEQ ID NO: 2777 - DNA, 66 bp, Synthetic construct; identical to SEQ ID NO: 149
  source 1..66: mol_type = other DNA

SEQ ID NO: 2778 - DNA, 66 bp, Synthetic construct; identical to SEQ ID NO: 1075
  source 1..66: mol_type = other DNA

SEQ ID NO: 2779 - DNA, 66 bp, Synthetic construct; identical to SEQ ID NO: 606
  source 1..66: mol_type = other DNA

SEQ ID NO: 2780 - DNA, 66 bp, Synthetic construct; identical to SEQ ID NO: 76
  source 1..66: mol_type = other DNA

SEQ ID NO: 2781 - DNA, 66 bp, Synthetic construct
  source 1..66: mol_type = other DNA
ttcatgtgtcccatctgtggggcaaactttactcagaaaggtaacctcctccgccacattaaactg

SEQ ID NO: 2782 - DNA, 66 bp, Synthetic construct; identical to SEQ ID NO: 1547
  source 1..66: mol_type = other DNA

SEQ ID NO: 2783 - DNA, 66 bp, Synthetic construct; identical to SEQ ID NO: 589
  source 1..66: mol_type = other DNA

SEQ ID NO: 2784 - DNA, 66 bp, Synthetic construct; identical to SEQ ID NO: 409
  source 1..66: mol_type = other DNA

SEQ ID NO: 2785 - DNA, 66 bp, Synthetic construct; identical to SEQ ID NO: 1314
  source 1..66: mol_type = other DNA

SEQ ID NO: 2786 - DNA, 66 bp, Synthetic construct; identical to SEQ ID NO: 251
  source 1..66: mol_type = other DNA

SEQ ID NO: 2787 - DNA, 66 bp, Synthetic construct; identical to SEQ ID NO: 152
  source 1..66: mol_type = other DNA

SEQ ID NO: 2788 - DNA, 66 bp, Synthetic construct; identical to SEQ ID NO: 1261
  source 1..66: mol_type = other DNA

SEQ ID NO: 2789 - DNA, 66 bp, Synthetic construct; identical to SEQ ID NO: 578
  source 1..66: mol_type = other DNA

SEQ ID NO: 2790 - DNA, 66 bp, Synthetic construct; identical to SEQ ID NO: 374
  source 1..66: mol_type = other DNA

SEQ ID NO: 2791 - DNA, 66 bp, Synthetic construct; identical to SEQ ID NO: 581
  source 1..66: mol_type = other DNA

SEQ ID NO: 2792 - DNA, 66 bp, Synthetic construct; identical to SEQ ID NO: 249
  source 1..66: mol_type = other DNA

SEQ ID NO: 2793 - DNA, 66 bp, Synthetic construct; identical to SEQ ID NO: 10
  source 1..66: mol_type = other DNA

SEQ ID NO: 2794 - DNA, 66 bp, Synthetic construct; identical to SEQ ID NO: 1174
  source 1..66: mol_type = other DNA

SEQ ID NO: 2795 - DNA, 66 bp, Synthetic construct; identical to SEQ ID NO: 555
  source 1..66: mol_type = other DNA

SEQ ID NO: 2796 - DNA, 66 bp, Synthetic construct; identical to SEQ ID NO: 631
  source 1..66: mol_type = other DNA

SEQ ID NO: 2797 - DNA, 66 bp, Synthetic construct; identical to SEQ ID NO: 29
  source 1..66: mol_type = other DNA

SEQ ID NO: 2798 - DNA, 66 bp, Synthetic construct; identical to SEQ ID NO: 265
  source 1..66: mol_type = other DNA

SEQ ID NO: 2799 - DNA, 66 bp, Synthetic construct; identical to SEQ ID NO: 451
  source 1..66: mol_type = other DNA

SEQ ID NO: 2800 - DNA, 66 bp, Synthetic construct; identical to SEQ ID NO: 121
  source 1..66: mol_type = other DNA

SEQ ID NO: 2801 - DNA, 66 bp, Synthetic construct; identical to SEQ ID NO: 1209
  source 1..66: mol_type = other DNA

SEQ ID NO: 2802 - DNA, 66 bp, Synthetic construct; identical to SEQ ID NO: 246
  source 1..66: mol_type = other DNA

SEQ ID NO: 2803 - DNA, 66 bp, Synthetic construct; identical to SEQ ID NO: 740
  source 1..66: mol_type = other DNA

SEQ ID NO: 2804 - DNA, 66 bp, Synthetic construct; identical to SEQ ID NO: 684
  source 1..66: mol_type = other DNA

SEQ ID NO: 2805 - DNA, 66 bp, Synthetic construct; identical to SEQ ID NO: 854
  source 1..66: mol_type = other DNA

SEQ ID NO: 2806 - DNA, 66 bp, Synthetic construct; identical to SEQ ID NO: 868
  source 1..66: mol_type = other DNA

SEQ ID NO: 2807 - DNA, 66 bp, Synthetic construct; identical to SEQ ID NO: 901
  source 1..66: mol_type = other DNA

SEQ ID NO: 2808 - DNA, 66 bp, Synthetic construct; identical to SEQ ID NO: 216
  source 1..66: mol_type = other DNA

SEQ ID NO: 2809 - DNA, 66 bp, Synthetic construct; identical to SEQ ID NO: 766
  source 1..66: mol_type = other DNA

SEQ ID NO: 2810 - DNA, 66 bp, Synthetic construct; identical to SEQ ID NO: 732
  source 1..66: mol_type = other DNA

SEQ ID NO: 2811 - DNA, 66 bp, Synthetic construct; identical to SEQ ID NO: 1046
  source 1..66: mol_type = other DNA

SEQ ID NO: 2812 - DNA, 66 bp, Synthetic construct
  source 1..66: mol_type = other DNA
ttcatgtgtccaatatgtggggcagaatttactcagaaaggtaacctcctccgccacattaaactg

SEQ ID NO: 2813 - DNA, 66 bp, Synthetic construct; identical to SEQ ID NO: 680
  source 1..66: mol_type = other DNA

SEQ ID NO: 2814 - DNA, 66 bp, Synthetic construct; identical to SEQ ID NO: 1660
  source 1..66: mol_type = other DNA

SEQ ID NO: 2815 - DNA, 66 bp, Synthetic construct; identical to SEQ ID NO: 550
  source 1..66: mol_type = other DNA

SEQ ID NO: 2816 - DNA, 66 bp, Synthetic construct; identical to SEQ ID NO: 1094
  source 1..66: mol_type = other DNA

SEQ ID NO: 2817 - DNA, 66 bp, Synthetic construct; identical to SEQ ID NO: 827
  source 1..66: mol_type = other DNA

SEQ ID NO: 2818 - DNA, 66 bp, Synthetic construct; identical to SEQ ID NO: 336
  source 1..66: mol_type = other DNA

SEQ ID NO: 2819 - DNA, 66 bp, Synthetic construct; identical to SEQ ID NO: 402
  source 1..66: mol_type = other DNA

SEQ ID NO: 2820 - DNA, 66 bp, Synthetic construct; identical to SEQ ID NO: 620
  source 1..66: mol_type = other DNA

SEQ ID NO: 2821 - DNA, 66 bp, Synthetic construct; identical to SEQ ID NO: 334
  source 1..66: mol_type = other DNA

SEQ ID NO: 2822 - DNA, 66 bp, Synthetic construct; identical to SEQ ID NO: 820
  source 1..66: mol_type = other DNA

SEQ ID NO: 2823 - DNA, 66 bp, Synthetic construct
  source 1..66: mol_type = other DNA
ttctcttgtccagtgtgtggggcagtgtttactcagaaaggtaacctcctccgccacattaaactg

SEQ ID NO: 2824 - DNA, 66 bp, Synthetic construct; identical to SEQ ID NO: 173
  source 1..66: mol_type = other DNA

SEQ ID NO: 2825 - DNA, 66 bp, Synthetic construct; identical to SEQ ID NO: 359
  source 1..66: mol_type = other DNA

SEQ ID NO: 2826 - DNA, 66 bp, Synthetic construct; identical to SEQ ID NO: 229
  source 1..66: mol_type = other DNA

SEQ ID NO: 2827 - DNA, 66 bp, Synthetic construct; identical to SEQ ID NO: 885
  source 1..66: mol_type = other DNA

SEQ ID NO: 2828 - DNA, 66 bp, Synthetic construct; identical to SEQ ID NO: 528
  source 1..66: mol_type = other DNA

SEQ ID NO: 2829 - DNA, 66 bp, Synthetic construct; identical to SEQ ID NO: 774
  source 1..66: mol_type = other DNA

SEQ ID NO: 2830 - DNA, 66 bp, Synthetic construct
  source 1..66: mol_type = other DNA
ttcatgtgtgaggtttgtggggcacagtttactcagaaaggtaacctcctccgccacattaaactg

SEQ ID NO: 2831 - DNA, 66 bp, Synthetic construct; identical to SEQ ID NO: 946
  source 1..66: mol_type = other DNA

SEQ ID NO: 2832 - DNA, 66 bp, Synthetic construct; identical to SEQ ID NO: 116
  source 1..66: mol_type = other DNA

SEQ ID NO: 2833 - DNA, 66 bp, Synthetic construct; identical to SEQ ID NO: 1719
  source 1..66: mol_type = other DNA

SEQ ID NO: 2834 - DNA, 66 bp, Synthetic construct; identical to SEQ ID NO: 11
  source 1..66: mol_type = other DNA

SEQ ID NO: 2835 - DNA, 66 bp, Synthetic construct; identical to SEQ ID NO: 603
  source 1..66: mol_type = other DNA

SEQ ID NO: 2836 - DNA, 66 bp, Synthetic construct; identical to SEQ ID NO: 328
  source 1..66: mol_type = other DNA

SEQ ID NO: 2837 - DNA, 66 bp, Synthetic construct; identical to SEQ ID NO: 91
  source 1..66: mol_type = other DNA

SEQ ID NO: 2838 - DNA, 66 bp, Synthetic construct; identical to SEQ ID NO: 477
  source 1..66: mol_type = other DNA

SEQ ID NO: 2839 - DNA, 66 bp, Synthetic construct
  source 1..66: mol_type = other DNA
ttcatgtgtgagatatgtggggcaaactttactcagaaaggtaacctcctccgccacattaaactg

SEQ ID NO: 2840 - DNA, 66 bp, Synthetic construct; identical to SEQ ID NO: 1364
  source 1..66: mol_type = other DNA

SEQ ID NO: 2841 - DNA, 66 bp, Synthetic construct; identical to SEQ ID NO: 744
  source 1..66: mol_type = other DNA

SEQ ID NO: 2842 - DNA, 66 bp, Synthetic construct; identical to SEQ ID NO: 17
  source 1..66: mol_type = other DNA

SEQ ID NO: 2843 - DNA, 66 bp, Synthetic construct; identical to SEQ ID NO: 591
  source 1..66: mol_type = other DNA

SEQ ID NO: 2844 - DNA, 66 bp, Synthetic construct; identical to SEQ ID NO: 764
  source 1..66: mol_type = other DNA

SEQ ID NO: 2845 - DNA, 66 bp, Synthetic construct; identical to SEQ ID NO: 1455
  source 1..66: mol_type = other DNA

SEQ ID NO: 2846 - DNA, 66 bp, Synthetic construct; identical to SEQ ID NO: 597
  source 1..66: mol_type = other DNA

SEQ ID NO: 2847 - DNA, 66 bp, Synthetic construct; identical to SEQ ID NO: 1339
  source 1..66: mol_type = other DNA

SEQ ID NO: 2848 - DNA, 66 bp, Synthetic construct; identical to SEQ ID NO: 1295
  source 1..66: mol_type = other DNA

SEQ ID NO: 2849 - DNA, 66 bp, Synthetic construct; identical to SEQ ID NO: 39
  source 1..66: mol_type = other DNA

SEQ ID NO: 2850 - DNA, 66 bp, Synthetic construct; identical to SEQ ID NO: 742
  source 1..66: mol_type = other DNA

SEQ ID NO: 2851 - DNA, 66 bp, Synthetic construct; identical to SEQ ID NO: 117
  source 1..66: mol_type = other DNA

SEQ ID NO: 2852 - DNA, 66 bp, Synthetic construct; identical to SEQ ID NO: 1407
  source 1..66: mol_type = other DNA

SEQ ID NO: 2853 - DNA, 66 bp, Synthetic construct; identical to SEQ ID NO: 869
  source 1..66: mol_type = other DNA

SEQ ID NO: 2854 - DNA, 66 bp, Synthetic construct; identical to SEQ ID NO: 1201
  source 1..66: mol_type = other DNA

SEQ ID NO: 2855 - DNA, 66 bp, Synthetic construct; identical to SEQ ID NO: 1043
  source 1..66: mol_type = other DNA

SEQ ID NO: 2856 - DNA, 66 bp, Synthetic construct
  source 1..66: mol_type = other DNA
ttcatgtgtgaggtttgtggggcaaactttactcagaaaggtaacctcctccgccacattaaactg

SEQ ID NO: 2857 - DNA, 66 bp, Synthetic construct; identical to SEQ ID NO: 1687
  source 1..66: mol_type = other DNA

SEQ ID NO: 2858 - DNA, 66 bp, Synthetic construct; identical to SEQ ID NO: 79
  source 1..66: mol_type = other DNA

SEQ ID NO: 2859 - DNA, 66 bp, Synthetic construct; identical to SEQ ID NO: 617
  source 1..66: mol_type = other DNA

SEQ ID NO: 2860 - DNA, 66 bp, Synthetic construct
  source 1..66: mol_type = other DNA
ttcatgtgtgagatctgtggggcacagtttactcagaaaggtaacctcctccgccacattaaactg

SEQ ID NO: 2861 - DNA, 66 bp, Synthetic construct; identical to SEQ ID NO: 2150
  source 1..66: mol_type = other DNA

SEQ ID NO: 2862 - DNA, 66 bp, Synthetic construct; identical to SEQ ID NO: 30
  source 1..66: mol_type = other DNA

SEQ ID NO: 2863 - DNA, 66 bp, Synthetic construct; identical to SEQ ID NO: 175
  source 1..66: mol_type = other DNA

SEQ ID NO: 2864 - DNA, 66 bp, Synthetic construct; identical to SEQ ID NO: 470
  source 1..66: mol_type = other DNA

SEQ ID NO: 2865 - DNA, 66 bp, Synthetic construct; identical to SEQ ID NO: 735
  source 1..66: mol_type = other DNA

SEQ ID NO: 2866 - DNA, 66 bp, Synthetic construct; identical to SEQ ID NO: 683
  source 1..66: mol_type = other DNA

SEQ ID NO: 2867 - DNA, 66 bp, Synthetic construct; identical to SEQ ID NO: 1019
  source 1..66: mol_type = other DNA

SEQ ID NO: 2868 - DNA, 66 bp, Synthetic construct; identical to SEQ ID NO: 174
  source 1..66: mol_type = other DNA

SEQ ID NO: 2869 - DNA, 66 bp, Synthetic construct
  source 1..66: mol_type = other DNA
ttcgtatgtaatatttgtggggcacaatttactcagaaaggtaacctcctccgccacattaaactg

SEQ ID NO: 2870 - DNA, 66 bp, Synthetic construct; identical to SEQ ID NO: 537
  source 1..66: mol_type = other DNA

SEQ ID NO: 2871 - DNA, 66 bp, Synthetic construct; identical to SEQ ID NO: 717
  source 1..66: mol_type = other DNA

SEQ ID NO: 2872 - DNA, 66 bp, Synthetic construct; identical to SEQ ID NO: 586
  source 1..66: mol_type = other DNA

SEQ ID NO: 2873 - DNA, 66 bp, Synthetic construct
  source 1..66: mol_type = other DNA
ttctgttgtgaggtgtgtggggcagtctttactcagaaaggtaacctcctccgccacattaaactg

SEQ ID NO: 2874 - DNA, 66 bp, Synthetic construct
  source 1..66: mol_type = other DNA
ttctgttgtcctatttgtggggcaatttttactcagaaaggtaacctcctccgccacattaaactg

SEQ ID NO: 2875 - DNA, 66 bp, Synthetic construct; identical to SEQ ID NO: 234
  source 1..66: mol_type = other DNA

SEQ ID NO: 2876 - DNA, 66 bp, Synthetic construct; identical to SEQ ID NO: 788
  source 1..66: mol_type = other DNA

SEQ ID NO: 2877 - DNA, 66 bp, Synthetic construct; identical to SEQ ID NO: 326
  source 1..66: mol_type = other DNA

SEQ ID NO: 2878 - DNA, 66 bp, Synthetic construct; identical to SEQ ID NO: 1032
  source 1..66: mol_type = other DNA

SEQ ID NO: 2879 - DNA, 66 bp, Synthetic construct; identical to SEQ ID NO: 787
  source 1..66: mol_type = other DNA

SEQ ID NO: 2880 - DNA, 66 bp, Synthetic construct; identical to SEQ ID NO: 570
  source 1..66: mol_type = other DNA

SEQ ID NO: 2881 - DNA, 66 bp, Synthetic construct; identical to SEQ ID NO: 1268
  source 1..66: mol_type = other DNA

SEQ ID NO: 2882 - DNA, 66 bp, Synthetic construct; identical to SEQ ID NO: 268
  source 1..66: mol_type = other DNA

SEQ ID NO: 2883 - DNA, 66 bp, Synthetic construct; identical to SEQ ID NO: 24
  source 1..66: mol_type = other DNA

SEQ ID NO: 2884 - DNA, 66 bp, Synthetic construct
  source 1..66: mol_type = other DNA
ttgatgtgtgaaatttgtggattcgcatgcactcagaaaggtaacctcctccgccacattaaactg

SEQ ID NO: 2885 - DNA, 66 bp, Synthetic construct; identical to SEQ ID NO: 322
  source 1..66: mol_type = other DNA

SEQ ID NO: 2886 - DNA, 66 bp, Synthetic construct; identical to SEQ ID NO: 1051
  source 1..66: mol_type = other DNA

SEQ ID NO: 2887 - DNA, 66 bp, Synthetic construct; identical to SEQ ID NO: 218
  source 1..66: mol_type = other DNA

SEQ ID NO: 2888 - DNA, 66 bp, Synthetic construct; identical to SEQ ID NO: 1073
  source 1..66: mol_type = other DNA

SEQ ID NO: 2889 - DNA, 66 bp, Synthetic construct
  source 1..66: mol_type = other DNA
ttcatgtgtccagtttgtggggcagaatttactcagaaaggtaacctcctccgccacattaaactg

SEQ ID NO: 2890 - DNA, 66 bp, Synthetic construct; identical to SEQ ID NO: 244
  source 1..66: mol_type = other DNA

SEQ ID NO: 2891 - DNA, 66 bp, Synthetic construct; identical to SEQ ID NO: 140
  source 1..66: mol_type = other DNA

SEQ ID NO: 2892 - DNA, 66 bp, Synthetic construct; identical to SEQ ID NO: 164
  source 1..66: mol_type = other DNA

SEQ ID NO: 2893 - DNA, 66 bp, Synthetic construct; identical to SEQ ID NO: 87
  source 1..66: mol_type = other DNA

SEQ ID NO: 2894 - DNA, 66 bp, Synthetic construct; identical to SEQ ID NO: 101
  source 1..66: mol_type = other DNA

SEQ ID NO: 2895 - DNA, 66 bp, Synthetic construct; identical to SEQ ID NO: 529
  source 1..66: mol_type = other DNA

SEQ ID NO: 2896 - DNA, 66 bp, Synthetic construct; identical to SEQ ID NO: 780
  source 1..66: mol_type = other DNA

SEQ ID NO: 2897 - DNA, 66 bp, Synthetic construct; identical to SEQ ID NO: 70
  source 1..66: mol_type = other DNA

SEQ ID NO: 2898 - DNA, 66 bp, Synthetic construct; identical to SEQ ID NO: 1272
  source 1..66: mol_type = other DNA

SEQ ID NO: 2899 - DNA, 66 bp, Synthetic construct; identical to SEQ ID NO: 809
  source 1..66: mol_type = other DNA

SEQ ID NO: 2900 - DNA, 66 bp, Synthetic construct; identical to SEQ ID NO: 1005
  source 1..66: mol_type = other DNA

SEQ ID NO: 2901 - DNA, 66 bp, Synthetic construct; identical to SEQ ID NO: 693
  source 1..66: mol_type = other DNA

SEQ ID NO: 2902 - DNA, 66 bp, Synthetic construct; identical to SEQ ID NO: 794
  source 1..66: mol_type = other DNA

SEQ ID NO: 2903 - DNA, 66 bp, Synthetic construct; identical to SEQ ID NO: 237
  source 1..66: mol_type = other DNA

SEQ ID NO: 2904 - DNA, 66 bp, Synthetic construct; identical to SEQ ID NO: 472
  source 1..66: mol_type = other DNA

SEQ ID NO: 2905 - DNA, 66 bp, Synthetic construct
  source 1..66: mol_type = other DNA
ttcatgtgtcctatctgtggggcacagtttactcagaaaggtaacctcctccgccacattaaactg

SEQ ID NO: 2906 - DNA, 66 bp, Synthetic construct; identical to SEQ ID NO: 1098
  source 1..66: mol_type = other DNA

SEQ ID NO: 2907 - DNA, 66 bp, Synthetic construct; identical to SEQ ID NO: 703
  source 1..66: mol_type = other DNA

SEQ ID NO: 2908 - DNA, 66 bp, Synthetic construct
  source 1..66: mol_type = other DNA
ttcatgtgtgatatttgtggggcagcctttactcagaaaggtaacctcctccgccacattaaactg

SEQ ID NO: 2909 - DNA, 66 bp, Synthetic construct; identical to SEQ ID NO: 988
  source 1..66: mol_type = other DNA

SEQ ID NO: 2910 - DNA, 66 bp, Synthetic construct; identical to SEQ ID NO: 1142
  source 1..66: mol_type = other DNA

SEQ ID NO: 2911 - DNA, 66 bp, Synthetic construct; identical to SEQ ID NO: 1185
  source 1..66: mol_type = other DNA

SEQ ID NO: 2912 - DNA, 66 bp, Synthetic construct; identical to SEQ ID NO: 1207
  source 1..66: mol_type = other DNA

SEQ ID NO: 2913 - DNA, 66 bp, Synthetic construct; identical to SEQ ID NO: 912
  source 1..66: mol_type = other DNA

SEQ ID NO: 2914 - DNA, 66 bp, Synthetic construct; identical to SEQ ID NO: 439
  source 1..66: mol_type = other DNA

SEQ ID NO: 2915 - DNA, 66 bp, Synthetic construct; identical to SEQ ID NO: 542
  source 1..66: mol_type = other DNA

SEQ ID NO: 2916 - DNA, 66 bp, Synthetic construct
  source 1..66: mol_type = other DNA
ttctcttgtcccatctgtggggcactctttactcagaaaggtaacctcctccgccacattaaactg

SEQ ID NO: 2917 - DNA, 66 bp, Synthetic construct; identical to SEQ ID NO: 1113
  source 1..66: mol_type = other DNA

SEQ ID NO: 2918 - DNA, 66 bp, Synthetic construct; identical to SEQ ID NO: 687
  source 1..66: mol_type = other DNA

SEQ ID NO: 2919 - DNA, 66 bp, Synthetic construct; identical to SEQ ID NO: 859
  source 1..66: mol_type = other DNA

SEQ ID NO: 2920 - DNA, 66 bp, Synthetic construct; identical to SEQ ID NO: 892
  source 1..66: mol_type = other DNA

SEQ ID NO: 2921 - DNA, 66 bp, Synthetic construct
  source 1..66: mol_type = other DNA
ttcatttgtgatatatgtggggcacagtttactcagaaaggtaacctcctccgccacattaaactg

SEQ ID NO: 2922 - DNA, 66 bp, Synthetic construct; identical to SEQ ID NO: 453
  source 1..66: mol_type = other DNA

SEQ ID NO: 2923 - DNA, 66 bp, Synthetic construct; identical to SEQ ID NO: 201
  source 1..66: mol_type = other DNA

SEQ ID NO: 2924 - DNA, 66 bp, Synthetic construct
  source 1..66: mol_type = other DNA
ttcggatgtgagatctgtggggcatattttactcagaaaggtaacctcctccgccacattaaactg

SEQ ID NO: 2925 - DNA, 66 bp, Synthetic construct; identical to SEQ ID NO: 489
  source 1..66: mol_type = other DNA

SEQ ID NO: 2926 - DNA, 66 bp, Synthetic construct; identical to SEQ ID NO: 1494
  source 1..66: mol_type = other DNA

SEQ ID NO: 2927 - DNA, 66 bp, Synthetic construct; identical to SEQ ID NO: 840
  source 1..66: mol_type = other DNA

SEQ ID NO: 2928 - DNA, 66 bp, Synthetic construct; identical to SEQ ID NO: 9
  source 1..66: mol_type = other DNA

SEQ ID NO: 2929 - DNA, 66 bp, Synthetic construct; identical to SEQ ID NO: 751
  source 1..66: mol_type = other DNA

SEQ ID NO: 2930 - DNA, 66 bp, Synthetic construct
  source 1..66: mol_type = other DNA
ctgatgtgtcctatttgcggcttcccgtgcactcagaaaggtaacctcctccgccacattaaactg

SEQ ID NO: 2931 - DNA, 66 bp, Synthetic construct; identical to SEQ ID NO: 943
  source 1..66: mol_type = other DNA

SEQ ID NO: 2932 - DNA, 66 bp, Synthetic construct; identical to SEQ ID NO: 659
  source 1..66: mol_type = other DNA

SEQ ID NO: 2933 - DNA, 66 bp, Synthetic construct; identical to SEQ ID NO: 933
  source 1..66: mol_type = other DNA

SEQ ID NO: 2934 - DNA, 66 bp, Synthetic construct; identical to SEQ ID NO: 777
  source 1..66: mol_type = other DNA

SEQ ID NO: 2935 - DNA, 66 bp, Synthetic construct; identical to SEQ ID NO: 1015
  source 1..66: mol_type = other DNA

SEQ ID NO: 2936 - DNA, 66 bp, Synthetic construct; identical to SEQ ID NO: 816
  source 1..66: mol_type = other DNA

SEQ ID NO: 2937 - DNA, 66 bp, Synthetic construct; identical to SEQ ID NO: 68
  source 1..66: mol_type = other DNA

SEQ ID NO: 2938 - DNA, 66 bp, Synthetic construct; identical to SEQ ID NO: 872
  source 1..66: mol_type = other DNA

SEQ ID NO: 2939 - DNA, 66 bp, Synthetic construct; identical to SEQ ID NO: 992
  source 1..66: mol_type = other DNA

SEQ ID NO: 2940 - DNA, 66 bp, Synthetic construct; identical to SEQ ID NO: 1583
  source 1..66: mol_type = other DNA

SEQ ID NO: 2941 - DNA, 66 bp, Synthetic construct; identical to SEQ ID NO: 485
  source 1..66: mol_type = other DNA

SEQ ID NO: 2942 - DNA, 66 bp, Synthetic construct; identical to SEQ ID NO: 697
  source 1..66: mol_type = other DNA

SEQ ID NO: 2943 - DNA, 66 bp, Synthetic construct; identical to SEQ ID NO: 874
  source 1..66: mol_type = other DNA

SEQ ID NO: 2944 - DNA, 66 bp, Synthetic construct; identical to SEQ ID NO: 836
  source 1..66: mol_type = other DNA

SEQ ID NO: 2945 - DNA, 66 bp, Synthetic construct; identical to SEQ ID NO: 736
  source 1..66: mol_type = other DNA

SEQ ID NO: 2946 - DNA, 66 bp, Synthetic construct; identical to SEQ ID NO: 558
  source 1..66: mol_type = other DNA

SEQ ID NO: 2947 - DNA, 66 bp, Synthetic construct; identical to SEQ ID NO: 782
  source 1..66: mol_type = other DNA

SEQ ID NO: 2948 - DNA, 66 bp, Synthetic construct; identical to SEQ ID NO: 31
  source 1..66: mol_type = other DNA

SEQ ID NO: 2949 - DNA, 66 bp, Synthetic construct
  source 1..66: mol_type = other DNA
ttcatgtgtaacatctgtggggcagcttttactcagaaaggtaacctcctccgccacattaaactg

SEQ ID NO: 2950 - DNA, 66 bp, Synthetic construct
  source 1..66: mol_type = other DNA
ttcgtttgtgacatttgtggggcacaatttactcagaaaggtaacctcctccgccacattaaactg

SEQ ID NO: 2951 - DNA, 66 bp, Synthetic construct; identical to SEQ ID NO: 1013
  source 1..66: mol_type = other DNA

SEQ ID NO: 2952 - DNA, 66 bp, Synthetic construct; identical to SEQ ID NO: 1024
  source 1..66: mol_type = other DNA

SEQ ID NO: 2953 - DNA, 66 bp, Synthetic construct; identical to SEQ ID NO: 320
  source 1..66: mol_type = other DNA

SEQ ID NO: 2954 - DNA, 66 bp, Synthetic construct
  source 1..66: mol_type = other DNA
ctgcactgtccaatctgcggcttctggtgcactcagaaaggtaacctcctccgccacattaaactg

SEQ ID NO: 2955 - DNA, 66 bp, Synthetic construct; identical to SEQ ID NO: 63
  source 1..66: mol_type = other DNA

SEQ ID NO: 2956 - DNA, 66 bp, Synthetic construct
  source 1..66: mol_type = other DNA
ttcatgtgtgagatttgtggggcatgttttactcagaaaggtaacctcctccgccacattaaactg

SEQ ID NO: 2957 - DNA, 66 bp, Synthetic construct; identical to SEQ ID NO: 1054
  source 1..66: mol_type = other DNA

SEQ ID NO: 2958 - DNA, 66 bp, Synthetic construct; identical to SEQ ID NO: 947
  source 1..66: mol_type = other DNA

SEQ ID NO: 2959 - DNA, 66 bp, Synthetic construct; identical to SEQ ID NO: 32
  source 1..66: mol_type = other DNA

SEQ ID NO: 2960 - DNA, 66 bp, Synthetic construct; identical to SEQ ID NO: 13
  source 1..66: mol_type = other DNA

SEQ ID NO: 2961 - DNA, 66 bp, Synthetic construct; identical to SEQ ID NO: 670
  source 1..66: mol_type = other DNA

SEQ ID NO: 2962 - DNA, 66 bp, Synthetic construct; identical to SEQ ID NO: 327
  source 1..66: mol_type = other DNA

SEQ ID NO: 2963 - DNA, 66 bp, Synthetic construct; identical to SEQ ID NO: 187
  source 1..66: mol_type = other DNA

SEQ ID NO: 2964 - DNA, 66 bp, Synthetic construct; identical to SEQ ID NO: 344
  source 1..66: mol_type = other DNA

SEQ ID NO: 2965 - DNA, 66 bp, Synthetic construct; identical to SEQ ID NO: 347
  source 1..66: mol_type = other DNA

SEQ ID NO: 2966 - DNA, 66 bp, Synthetic construct; identical to SEQ ID NO: 284
  source 1..66: mol_type = other DNA

SEQ ID NO: 2967 - DNA, 66 bp, Synthetic construct; identical to SEQ ID NO: 1164
  source 1..66: mol_type = other DNA

SEQ ID NO: 2968 - DNA, 66 bp, Synthetic construct; identical to SEQ ID NO: 27
  source 1..66: mol_type = other DNA

SEQ ID NO: 2969 - DNA, 66 bp, Synthetic construct
  source 1..66: mol_type = other DNA
ttcatgtgtaatgtatgtggggcaccgtttactcagaaaggtaacctcctccgccacattaaactg

SEQ ID NO: 2970 - DNA, 66 bp, Synthetic construct
  source 1..66: mol_type = other DNA
ttctgctgtcccgtttgtggggcaatttttactcagaaaggtaacctcctccgccacattaaactg

SEQ ID NO: 2971 - DNA, 66 bp, Synthetic construct; identical to SEQ ID NO: 177
  source 1..66: mol_type = other DNA

SEQ ID NO: 2972 - DNA, 66 bp, Synthetic construct; identical to SEQ ID NO: 118
  source 1..66: mol_type = other DNA

SEQ ID NO: 2973 - DNA, 66 bp, Synthetic construct; identical to SEQ ID NO: 719
  source 1..66: mol_type = other DNA

SEQ ID NO: 2974 - DNA, 66 bp, Synthetic construct; identical to SEQ ID NO: 418
  source 1..66: mol_type = other DNA

SEQ ID NO: 2975 - DNA, 66 bp, Synthetic construct; identical to SEQ ID NO: 1276
  source 1..66: mol_type = other DNA

SEQ ID NO: 2976 - DNA, 66 bp, Synthetic construct; identical to SEQ ID NO: 41
  source 1..66: mol_type = other DNA

SEQ ID NO: 2977 - DNA, 66 bp, Synthetic construct; identical to SEQ ID NO: 392
  source 1..66: mol_type = other DNA

SEQ ID NO: 2978 - DNA, 66 bp, Synthetic construct; identical to SEQ ID NO: 47
  source 1..66: mol_type = other DNA

SEQ ID NO: 2979 - DNA, 66 bp, Synthetic construct; identical to SEQ ID NO: 43
  source 1..66: mol_type = other DNA

SEQ ID NO: 2980 - DNA, 66 bp, Synthetic construct; identical to SEQ ID NO: 971
  source 1..66: mol_type = other DNA

SEQ ID NO: 2981 - DNA, 66 bp, Synthetic construct; identical to SEQ ID NO: 283
  source 1..66: mol_type = other DNA

SEQ ID NO: 2982 - DNA, 66 bp, Synthetic construct; identical to SEQ ID NO: 159
  source 1..66: mol_type = other DNA

SEQ ID NO: 2983 - DNA, 66 bp, Synthetic construct
  source 1..66: mol_type = other DNA
ttcatgtgtgagatatgtggggcagtttttactcagaaaggtaacctcctccgccacattaaactg

SEQ ID NO: 2984 - DNA, 66 bp, Synthetic construct
  source 1..66: mol_type = other DNA
ttctgctgtgaaatctgtggggcaatatttactcagaaaggtaacctcctccgccacattaaactg

SEQ ID NO: 2985 - DNA, 66 bp, Synthetic construct; identical to SEQ ID NO: 228
  source 1..66: mol_type = other DNA

SEQ ID NO: 2986 - DNA, 66 bp, Synthetic construct; identical to SEQ ID NO: 796
  source 1..66: mol_type = other DNA

SEQ ID NO: 2987 - DNA, 66 bp, Synthetic construct; identical to SEQ ID NO: 1050
  source 1..66: mol_type = other DNA

SEQ ID NO: 2988 - DNA, 66 bp, Synthetic construct; identical to SEQ ID NO: 539
  source 1..66: mol_type = other DNA

SEQ ID NO: 2989 - DNA, 66 bp, Synthetic construct; identical to SEQ ID NO: 1344
  source 1..66: mol_type = other DNA

SEQ ID NO: 2990 - DNA, 66 bp, Synthetic construct
  source 1..66: mol_type = other DNA
ttcatgtgtccgatatgtggggcatgttttactcagaaaggtaacctcctccgccacattaaactg

SEQ ID NO: 2991 - DNA, 66 bp, Synthetic construct; identical to SEQ ID NO: 380
  source 1..66: mol_type = other DNA

SEQ ID NO: 2992 - DNA, 66 bp, Synthetic construct; identical to SEQ ID NO: 1505
  source 1..66: mol_type = other DNA

SEQ ID NO: 2993 - DNA, 66 bp, Synthetic construct; identical to SEQ ID NO: 1011
  source 1..66: mol_type = other DNA

SEQ ID NO: 2994 - DNA, 66 bp, Synthetic construct; identical to SEQ ID NO: 1133
  source 1..66: mol_type = other DNA

SEQ ID NO: 2995 - DNA, 66 bp, Synthetic construct; identical to SEQ ID NO: 33
  source 1..66: mol_type = other DNA

SEQ ID NO: 2996 - DNA, 66 bp, Synthetic construct; identical to SEQ ID NO: 301
  source 1..66: mol_type = other DNA

SEQ ID NO: 2997 - DNA, 66 bp, Synthetic construct; identical to SEQ ID NO: 1228
  source 1..66: mol_type = other DNA

SEQ ID NO: 2998 - DNA, 66 bp, Synthetic construct; identical to SEQ ID NO: 627
  source 1..66: mol_type = other DNA

SEQ ID NO: 2999 - DNA, 66 bp, Synthetic construct; identical to SEQ ID NO: 646
  source 1..66: mol_type = other DNA

SEQ ID NO: 3000 - DNA, 66 bp, Synthetic construct; identical to SEQ ID NO: 913
  source 1..66: mol_type = other DNA

SEQ ID NO: 3001 - DNA, 66 bp, Synthetic construct; identical to SEQ ID NO: 425
  source 1..66: mol_type = other DNA

SEQ ID NO: 3002 - DNA, 66 bp, Synthetic construct; identical to SEQ ID NO: 633
  source 1..66: mol_type = other DNA

SEQ ID NO: 3003 - DNA, 66 bp, Synthetic construct; identical to SEQ ID NO: 987
  source 1..66: mol_type = other DNA

SEQ ID NO: 3004 - DNA, 66 bp, Synthetic construct; identical to SEQ ID NO: 941
  source 1..66: mol_type = other DNA

SEQ ID NO: 3005 - DNA, 66 bp, Synthetic construct; identical to SEQ ID NO: 389
  source 1..66: mol_type = other DNA

SEQ ID NO: 3006 - DNA, 66 bp, Synthetic construct; identical to SEQ ID NO: 270
  source 1..66: mol_type = other DNA

SEQ ID NO: 3007 - DNA, 66 bp, Synthetic construct; identical to SEQ ID NO: 8
  source 1..66: mol_type = other DNA

SEQ ID NO: 3008 - DNA, 66 bp, Synthetic construct; identical to SEQ ID NO: 610
  source 1..66: mol_type = other DNA

SEQ ID NO: 3009 - DNA, 66 bp, Synthetic construct; identical to SEQ ID NO: 170
  source 1..66: mol_type = other DNA

SEQ ID NO: 3010 - DNA, 66 bp, Synthetic construct
  source 1..66: mol_type = other DNA
ttaatgtgccctatttgcggctttttttgcactcagaaaggtaacctcctccgccacattaaactg

SEQ ID NO: 3011 - DNA, 66 bp, Synthetic construct; identical to SEQ ID NO: 331
  source 1..66: mol_type = other DNA

SEQ ID NO: 3012 - DNA, 66 bp, Synthetic construct; identical to SEQ ID NO: 60
  source 1..66: mol_type = other DNA

SEQ ID NO: 3013 - DNA, 66 bp, Synthetic construct; identical to SEQ ID NO: 113
  source 1..66: mol_type = other DNA

SEQ ID NO: 3014 - DNA, 66 bp, Synthetic construct; identical to SEQ ID NO: 648
  source 1..66: mol_type = other DNA

SEQ ID NO: 3015 - DNA, 66 bp, Synthetic construct; identical to SEQ ID NO: 1111
  source 1..66: mol_type = other DNA

SEQ ID NO: 3016 - DNA, 66 bp, Synthetic construct; identical to SEQ ID NO: 1368
  source 1..66: mol_type = other DNA

SEQ ID NO: 3017 - DNA, 66 bp, Synthetic construct; identical to SEQ ID NO: 1312
  source 1..66: mol_type = other DNA

SEQ ID NO: 3018 - DNA, 66 bp, Synthetic construct; identical to SEQ ID NO: 688
  source 1..66: mol_type = other DNA

SEQ ID NO: 3019 - DNA, 66 bp, Synthetic construct; identical to SEQ ID NO: 238
  source 1..66: mol_type = other DNA

SEQ ID NO: 3020 - DNA, 66 bp, Synthetic construct; identical to SEQ ID NO: 54
  source 1..66: mol_type = other DNA

SEQ ID NO: 3021 - DNA, 66 bp, Synthetic construct
  source 1..66: mol_type = other DNA
ttcatgtgtgaggtgtgtggggcatgttttactcagaaaggtaacctcctccgccacattaaactg

SEQ ID NO: 3022 - DNA, 66 bp, Synthetic construct
  source 1..66: mol_type = other DNA
ttctgttgtaacatctgtggggcatgttttactcagaaaggtaacctcctccgccacattaaactg

SEQ ID NO: 3023 - DNA, 66 bp, Synthetic construct; identical to SEQ ID NO: 1107
  source 1..66: mol_type = other DNA

SEQ ID NO: 3024 - DNA, 66 bp, Synthetic construct
  source 1..66: mol_type = other DNA
ttcatgtgtgacgtatgtggggcaccttttactcagaaaggtaacctcctccgccacattaaactg

SEQ ID NO: 3025 - DNA, 66 bp, Synthetic construct; identical to SEQ ID NO: 401
  source 1..66: mol_type = other DNA

SEQ ID NO: 3026 - DNA, 66 bp, Synthetic construct; identical to SEQ ID NO: 1176
  source 1..66: mol_type = other DNA

SEQ ID NO: 3027 - DNA, 66 bp, Synthetic construct; identical to SEQ ID NO: 72
  source 1..66: mol_type = other DNA

SEQ ID NO: 3028 - DNA, 66 bp, Synthetic construct; identical to SEQ ID NO: 1099
  source 1..66: mol_type = other DNA

SEQ ID NO: 3029 - DNA, 66 bp, Synthetic construct; identical to SEQ ID NO: 479
  source 1..66: mol_type = other DNA

SEQ ID NO: 3030 - DNA, 66 bp, Synthetic construct; identical to SEQ ID NO: 197
  source 1..66: mol_type = other DNA

SEQ ID NO: 3031 - DNA, 66 bp, Synthetic construct; identical to SEQ ID NO: 1477
  source 1..66: mol_type = other DNA

SEQ ID NO: 3032 - DNA, 66 bp, Synthetic construct; identical to SEQ ID NO: 262
  source 1..66: mol_type = other DNA

SEQ ID NO: 3033 - DNA, 66 bp, Synthetic construct; identical to SEQ ID NO: 574
  source 1..66: mol_type = other DNA

SEQ ID NO: 3034 - DNA, 66 bp, Synthetic construct; identical to SEQ ID NO: 366
  source 1..66: mol_type = other DNA

SEQ ID NO: 3035 - DNA, 66 bp, Synthetic construct; identical to SEQ ID NO: 115
  source 1..66: mol_type = other DNA

SEQ ID NO: 3036 - DNA, 66 bp, Synthetic construct; identical to SEQ ID NO: 1145
  source 1..66: mol_type = other DNA

SEQ ID NO: 3037 - DNA, 66 bp, Synthetic construct; identical to SEQ ID NO: 536
  source 1..66: mol_type = other DNA

SEQ ID NO: 3038 - DNA, 66 bp, Synthetic construct; identical to SEQ ID NO: 995
  source 1..66: mol_type = other DNA

SEQ ID NO: 3039 - DNA, 66 bp, Synthetic construct; identical to SEQ ID NO: 746
  source 1..66: mol_type = other DNA

SEQ ID NO: 3040 - DNA, 66 bp, Synthetic construct; identical to SEQ ID NO: 1090
  source 1..66: mol_type = other DNA

SEQ ID NO: 3041 - DNA, 66 bp, Synthetic construct; identical to SEQ ID NO: 769
  source 1..66: mol_type = other DNA

SEQ ID NO: 3042 - DNA, 66 bp, Synthetic construct; identical to SEQ ID NO: 259
  source 1..66: mol_type = other DNA

SEQ ID NO: 3043 - DNA, 66 bp, Synthetic construct; identical to SEQ ID NO: 982
  source 1..66: mol_type = other DNA

SEQ ID NO: 3044 - DNA, 66 bp, Synthetic construct; identical to SEQ ID NO: 1231
  source 1..66: mol_type = other DNA

SEQ ID NO: 3045 - DNA, 66 bp, Synthetic construct; identical to SEQ ID NO: 1171
  source 1..66: mol_type = other DNA

SEQ ID NO: 3046 - DNA, 66 bp, Synthetic construct
  source 1..66: mol_type = other DNA
ctgatgtgcccaatttgcggttttgagtgtactcagaaaggtaacctcctccgccacattaaactg

SEQ ID NO: 3047 - DNA, 66 bp, Synthetic construct; identical to SEQ ID NO: 1080
  source 1..66: mol_type = other DNA

SEQ ID NO: 3048 - DNA, 66 bp, Synthetic construct; identical to SEQ ID NO: 1110
  source 1..66: mol_type = other DNA

SEQ ID NO: 3049 - DNA, 66 bp, Synthetic construct; identical to SEQ ID NO: 1101
  source 1..66: mol_type = other DNA

SEQ ID NO: 3050 - DNA, 66 bp, Synthetic construct; identical to SEQ ID NO: 508
  source 1..66: mol_type = other DNA

SEQ ID NO: 3051 - DNA, 66 bp, Synthetic construct; identical to SEQ ID NO: 579
  source 1..66: mol_type = other DNA

SEQ ID NO: 3052 - DNA, 66 bp, Synthetic construct; identical to SEQ ID NO: 1251
  source 1..66: mol_type = other DNA

SEQ ID NO: 3053 - DNA, 66 bp, Synthetic construct; identical to SEQ ID NO: 973
  source 1..66: mol_type = other DNA

SEQ ID NO: 3054 - DNA, 66 bp, Synthetic construct; identical to SEQ ID NO: 1048
  source 1..66: mol_type = other DNA

SEQ ID NO: 3055 - DNA, 66 bp, Synthetic construct; identical to SEQ ID NO: 991
  source 1..66: mol_type = other DNA

SEQ ID NO: 3056 - DNA, 66 bp, Synthetic construct; identical to SEQ ID NO: 956
  source 1..66: mol_type = other DNA

SEQ ID NO: 3057 - DNA, 66 bp, Synthetic construct; identical to SEQ ID NO: 42
  source 1..66: mol_type = other DNA

SEQ ID NO: 3058 - DNA, 66 bp, Synthetic construct; identical to SEQ ID NO: 563
  source 1..66: mol_type = other DNA

SEQ ID NO: 3059 - DNA, 66 bp, Synthetic construct; identical to SEQ ID NO: 215
  source 1..66: mol_type = other DNA

SEQ ID NO: 3060 - DNA, 66 bp, Synthetic construct; identical to SEQ ID NO: 1243
  source 1..66: mol_type = other DNA

SEQ ID NO: 3061 - DNA, 66 bp, Synthetic construct
  source 1..66: mol_type = other DNA
ttctcctgtgagatttgtggggcactttttactcagaaaggtaacctcctccgccacattaaactg

SEQ ID NO: 3062 - DNA, 66 bp, Synthetic construct; identical to SEQ ID NO: 66
  source 1..66: mol_type = other DNA

SEQ ID NO: 3063 - DNA, 66 bp, Synthetic construct; identical to SEQ ID NO: 36
  source 1..66: mol_type = other DNA

SEQ ID NO: 3064 - DNA, 66 bp, Synthetic construct; identical to SEQ ID NO: 58
  source 1..66: mol_type = other DNA

SEQ ID NO: 3065 - DNA, 66 bp, Synthetic construct; identical to SEQ ID NO: 1077
  source 1..66: mol_type = other DNA

SEQ ID NO: 3066 - DNA, 66 bp, Synthetic construct; identical to SEQ ID NO: 137
  source 1..66: mol_type = other DNA

SEQ ID NO: 3067 - DNA, 66 bp, Synthetic construct; identical to SEQ ID NO: 1354
  source 1..66: mol_type = other DNA

SEQ ID NO: 3068 - DNA, 66 bp, Synthetic construct; identical to SEQ ID NO: 921
  source 1..66: mol_type = other DNA

SEQ ID NO: 3069 - DNA, 66 bp, Synthetic construct; identical to SEQ ID NO: 951
  source 1..66: mol_type = other DNA

SEQ ID NO: 3070 - DNA, 66 bp, Synthetic construct; identical to SEQ ID NO: 373
  source 1..66: mol_type = other DNA

SEQ ID NO: 3071 - DNA, 66 bp, Synthetic construct; identical to SEQ ID NO: 949
  source 1..66: mol_type = other DNA

SEQ ID NO: 3072 - DNA, 66 bp, Synthetic construct; identical to SEQ ID NO: 853
  source 1..66: mol_type = other DNA

SEQ ID NO: 3073 - DNA, 66 bp, Synthetic construct; identical to SEQ ID NO: 190
  source 1..66: mol_type = other DNA

SEQ ID NO: 3074 - DNA, 66 bp, Synthetic construct; identical to SEQ ID NO: 239
  source 1..66: mol_type = other DNA

SEQ ID NO: 3075 - DNA, 66 bp, Synthetic construct; identical to SEQ ID NO: 20
  source 1..66: mol_type = other DNA

SEQ ID NO: 3076 - DNA, 66 bp, Synthetic construct; identical to SEQ ID NO: 143
  source 1..66: mol_type = other DNA

SEQ ID NO: 3077 - DNA, 66 bp, Synthetic construct; identical to SEQ ID NO: 258
  source 1..66: mol_type = other DNA

SEQ ID NO: 3078 - DNA, 66 bp, Synthetic construct; identical to SEQ ID NO: 83
  source 1..66: mol_type = other DNA

SEQ ID NO: 3079 - DNA, 66 bp, Synthetic construct; identical to SEQ ID NO: 1014
  source 1..66: mol_type = other DNA

SEQ ID NO: 3080 - DNA, 66 bp, Synthetic construct; identical to SEQ ID NO: 435
  source 1..66: mol_type = other DNA

SEQ ID NO: 3081 - DNA, 66 bp, Synthetic construct; identical to SEQ ID NO: 161
  source 1..66: mol_type = other DNA

SEQ ID NO: 3082 - DNA, 66 bp, Synthetic construct; identical to SEQ ID NO: 587
  source 1..66: mol_type = other DNA

SEQ ID NO: 3083 - DNA, 66 bp, Synthetic construct; identical to SEQ ID NO: 826
  source 1..66: mol_type = other DNA

SEQ ID NO: 3084 - DNA, 66 bp, Synthetic construct; identical to SEQ ID NO: 1252
  source 1..66: mol_type = other DNA

SEQ ID NO: 3085 - DNA, 66 bp, Synthetic construct; identical to SEQ ID NO: 1060
  source 1..66: mol_type = other DNA

SEQ ID NO: 3086 - DNA, 66 bp, Synthetic construct; identical to SEQ ID NO: 45
  source 1..66: mol_type = other DNA

SEQ ID NO: 3087 - DNA, 66 bp, Synthetic construct; identical to SEQ ID NO: 1003
  source 1..66: mol_type = other DNA

SEQ ID NO: 3088 - DNA, 66 bp, Synthetic construct; identical to SEQ ID NO: 1257
  source 1..66: mol_type = other DNA

SEQ ID NO: 3089 - DNA, 66 bp, Synthetic construct; identical to SEQ ID NO: 1238
  source 1..66: mol_type = other DNA

SEQ ID NO: 3090 - DNA, 66 bp, Synthetic construct; identical to SEQ ID NO: 233
  source 1..66: mol_type = other DNA

SEQ ID NO: 3091 - DNA, 66 bp, Synthetic construct; identical to SEQ ID NO: 119
  source 1..66: mol_type = other DNA

SEQ ID NO: 3092 - DNA, 66 bp, Synthetic construct; identical to SEQ ID NO: 756
  source 1..66: mol_type = other DNA

SEQ ID NO: 3093 - DNA, 66 bp, Synthetic construct; identical to SEQ ID NO: 48
  source 1..66: mol_type = other DNA

SEQ ID NO: 3094 - DNA, 66 bp, Synthetic construct; identical to SEQ ID NO: 203
  source 1..66: mol_type = other DNA

SEQ ID NO: 3095 - DNA, 66 bp, Synthetic construct; identical to SEQ ID NO: 98
  source 1..66: mol_type = other DNA

SEQ ID NO: 3096 - DNA, 66 bp, Synthetic construct
  source 1..66: mol_type = other DNA
ttcatatgtccagtgtgtggggcaatgtttactcagaaaggtaacctcctccgccacattaaactg

SEQ ID NO: 3097 - DNA, 66 bp, Synthetic construct; identical to SEQ ID NO: 1557
  source 1..66: mol_type = other DNA

SEQ ID NO: 3098 - DNA, 66 bp, Synthetic construct
  source 1..66: mol_type = other DNA
ttctgttgtgaagtgtgtggggcaatctttactcagaaaggtaacctcctccgccacattaaactg

SEQ ID NO: 3099 - DNA, 66 bp, Synthetic construct
  source 1..66: mol_type = other DNA
ttcgggtgtaatatatgtggggcattctttactcagaaaggtaacctcctccgccacattaaactg

SEQ ID NO: 3100 - DNA, 66 bp, Synthetic construct; identical to SEQ ID NO: 696
  source 1..66: mol_type = other DNA

SEQ ID NO: 3101 - DNA, 66 bp, Synthetic construct; identical to SEQ ID NO: 1519
  source 1..66: mol_type = other DNA

SEQ ID NO: 3102 - DNA, 66 bp, Synthetic construct; identical to SEQ ID NO: 1213
  source 1..66: mol_type = other DNA

SEQ ID NO: 3103 - DNA, 66 bp, Synthetic construct
  source 1..66: mol_type = other DNA
ttcatgtgtccgcagtgtggggcagcgtttactcagaaaggtaacctcctccgccacattaaactg

SEQ ID NO: 3104 - DNA, 66 bp, Synthetic construct; identical to SEQ ID NO: 554
  source 1..66: mol_type = other DNA

SEQ ID NO: 3105 - DNA, 66 bp, Synthetic construct; identical to SEQ ID NO: 1432
  source 1..66: mol_type = other DNA

SEQ ID NO: 3106 - DNA, 66 bp, Synthetic construct; identical to SEQ ID NO: 1285
  source 1..66: mol_type = other DNA

SEQ ID NO: 3107 - DNA, 66 bp, Synthetic construct; identical to SEQ ID NO: 548
  source 1..66: mol_type = other DNA

SEQ ID NO: 3108 - DNA, 66 bp, Synthetic construct; identical to SEQ ID NO: 1351
  source 1..66: mol_type = other DNA

SEQ ID NO: 3109 - DNA, 66 bp, Synthetic construct; identical to SEQ ID NO: 1611
  source 1..66: mol_type = other DNA

SEQ ID NO: 3110 - DNA, 66 bp, Synthetic construct; identical to SEQ ID NO: 524
  source 1..66: mol_type = other DNA

SEQ ID NO: 3111 - DNA, 66 bp, Synthetic construct
  source 1..66: mol_type = other DNA
ttctcttgtcccgtgtgtggggcactgtttactcagaaaggtaacctcctccgccacattaaactg

SEQ ID NO: 3112 - DNA, 66 bp, Synthetic construct; identical to SEQ ID NO: 902
  source 1..66: mol_type = other DNA

SEQ ID NO: 3113 - DNA, 66 bp, Synthetic construct; identical to SEQ ID NO: 592
  source 1..66: mol_type = other DNA

SEQ ID NO: 3114 - DNA, 66 bp, Synthetic construct; identical to SEQ ID NO: 502
  source 1..66: mol_type = other DNA

SEQ ID NO: 3115 - DNA, 66 bp, Synthetic construct; identical to SEQ ID NO: 180
  source 1..66: mol_type = other DNA

SEQ ID NO: 3116 - DNA, 66 bp, Synthetic construct; identical to SEQ ID NO: 1267
  source 1..66: mol_type = other DNA

SEQ ID NO: 3117 - DNA, 66 bp, Synthetic construct; identical to SEQ ID NO: 672
  source 1..66: mol_type = other DNA

SEQ ID NO: 3118 - DNA, 66 bp, Synthetic construct; identical to SEQ ID NO: 49
  source 1..66: mol_type = other DNA

SEQ ID NO: 3119 - DNA, 66 bp, Synthetic construct; identical to SEQ ID NO: 1242
  source 1..66: mol_type = other DNA

SEQ ID NO: 3120 - DNA, 66 bp, Synthetic construct
  source 1..66: mol_type = other DNA
ttcagatgtgacatttgtggggcagcttttactcagaaaggtaacctcctccgccacattaaactg

SEQ ID NO: 3121 - DNA, 66 bp, Synthetic construct; identical to SEQ ID NO: 972
  source 1..66: mol_type = other DNA

SEQ ID NO: 3122 - DNA, 66 bp, Synthetic construct; identical to SEQ ID NO: 5
  source 1..66: mol_type = other DNA

SEQ ID NO: 3123 - DNA, 66 bp, Synthetic construct; identical to SEQ ID NO: 35
  source 1..66: mol_type = other DNA

SEQ ID NO: 3124 - DNA, 66 bp, Synthetic construct; identical to SEQ ID NO: 184
  source 1..66: mol_type = other DNA

SEQ ID NO: 3125 - DNA, 66 bp, Synthetic construct; identical to SEQ ID NO: 37
  source 1..66: mol_type = other DNA

SEQ ID NO: 3126 - DNA, 66 bp, Synthetic construct; identical to SEQ ID NO: 1052
  source 1..66: mol_type = other DNA

SEQ ID NO: 3127 - DNA, 66 bp, Synthetic construct; identical to SEQ ID NO: 153
  source 1..66: mol_type = other DNA

SEQ ID NO: 3128 - DNA, 66 bp, Synthetic construct; identical to SEQ ID NO: 1318
  source 1..66: mol_type = other DNA

SEQ ID NO: 3129 - DNA, 66 bp, Synthetic construct; identical to SEQ ID NO: 1121
  source 1..66: mol_type = other DNA

SEQ ID NO: 3130 - DNA, 66 bp, Synthetic construct; identical to SEQ ID NO: 1103
  source 1..66: mol_type = other DNA

SEQ ID NO: 3131 - DNA, 66 bp, Synthetic construct; identical to SEQ ID NO: 220
  source 1..66: mol_type = other DNA

SEQ ID NO: 3132 - DNA, 66 bp, Synthetic construct; identical to SEQ ID NO: 56
  source 1..66: mol_type = other DNA

SEQ ID NO: 3133 - DNA, 66 bp, Synthetic construct; identical to SEQ ID NO: 248
  source 1..66: mol_type = other DNA

SEQ ID NO: 3134 - DNA, 66 bp, Synthetic construct; identical to SEQ ID NO: 1389
  source 1..66: mol_type = other DNA

SEQ ID NO: 3135 - DNA, 66 bp, Synthetic construct; identical to SEQ ID NO: 369
  source 1..66: mol_type = other DNA

SEQ ID NO: 3136 - DNA, 66 bp, Synthetic construct
  source 1..66: mol_type = other DNA
ttccggtgtaaccagtgtggggcaccctttactcagaaaggtaacctcctccgccacattaaactg

SEQ ID NO: 3137 - DNA, 66 bp, Synthetic construct
  source 1..66: mol_type = other DNA
ttcatctgtgaggtgtgtggggcagtgtttactcagaaaggtaacctcctccgccacattaaactg

SEQ ID NO: 3138 - DNA, 66 bp, Synthetic construct; identical to SEQ ID NO: 734
  source 1..66: mol_type = other DNA

SEQ ID NO: 3139 - DNA, 66 bp, Synthetic construct; identical to SEQ ID NO: 1343
  source 1..66: mol_type = other DNA

SEQ ID NO: 3140 - DNA, 66 bp, Synthetic construct; identical to SEQ ID NO: 624
  source 1..66: mol_type = other DNA

SEQ ID NO: 3141 - DNA, 66 bp, Synthetic construct; identical to SEQ ID NO: 481
  source 1..66: mol_type = other DNA

SEQ ID NO: 3142 - DNA, 66 bp, Synthetic construct; identical to SEQ ID NO: 785
  source 1..66: mol_type = other DNA

SEQ ID NO: 3143 - DNA, 66 bp, Synthetic construct
  source 1..66: mol_type = other DNA
ttctgctgtccggtgtgtggggcaaattttactcagaaaggtaacctcctccgccacattaaactg

SEQ ID NO: 3144 - DNA, 66 bp, Synthetic construct; identical to SEQ ID NO: 332
  source 1..66: mol_type = other DNA

SEQ ID NO: 3145 - DNA, 66 bp, Synthetic construct; identical to SEQ ID NO: 1006
  source 1..66: mol_type = other DNA

SEQ ID NO: 3146 - DNA, 66 bp, Synthetic construct; identical to SEQ ID NO: 232
  source 1..66: mol_type = other DNA

SEQ ID NO: 3147 - DNA, 66 bp, Synthetic construct; identical to SEQ ID NO: 480
  source 1..66: mol_type = other DNA

SEQ ID NO: 3148 - DNA, 66 bp, Synthetic construct; identical to SEQ ID NO: 1018
  source 1..66: mol_type = other DNA

SEQ ID NO: 3149 - DNA, 66 bp, Synthetic construct; identical to SEQ ID NO: 1286
  source 1..66: mol_type = other DNA

SEQ ID NO: 3150 - DNA, 66 bp, Synthetic construct; identical to SEQ ID NO: 343
  source 1..66: mol_type = other DNA

SEQ ID NO: 3151 - DNA, 66 bp, Synthetic construct; identical to SEQ ID NO: 208
  source 1..66: mol_type = other DNA

SEQ ID NO: 3152 - DNA, 66 bp, Synthetic construct; identical to SEQ ID NO: 2387
  source 1..66: mol_type = other DNA

SEQ ID NO: 3153 - DNA, 66 bp, Synthetic construct; identical to SEQ ID NO: 842
  source 1..66: mol_type = other DNA

SEQ ID NO: 3154 - DNA, 66 bp, Synthetic construct; identical to SEQ ID NO: 725
  source 1..66: mol_type = other DNA

SEQ ID NO: 3155 - DNA, 66 bp, Synthetic construct; identical to SEQ ID NO: 1668
  source 1..66: mol_type = other DNA

SEQ ID NO: 3156 - DNA, 66 bp, Synthetic construct; identical to SEQ ID NO: 211
  source 1..66: mol_type = other DNA

SEQ ID NO: 3157 - DNA, 66 bp, Synthetic construct; identical to SEQ ID NO: 1012
  source 1..66: mol_type = other DNA

SEQ ID NO: 3158 - DNA, 66 bp, Synthetic construct
  source 1..66: mol_type = other DNA
ttcatgtgtccggtgtgtggggcatgttttactcagaaaggtaacctcctccgccacattaaactg

SEQ ID NO: 3159 - DNA, 66 bp, Synthetic construct; identical to SEQ ID NO: 1405
  source 1..66: mol_type = other DNA

SEQ ID NO: 3160 - DNA, 66 bp, Synthetic construct; identical to SEQ ID NO: 1235
  source 1..66: mol_type = other DNA

SEQ ID NO: 3161 - DNA, 66 bp, Synthetic construct
  source 1..66: mol_type = other DNA
ttcatctgtgacgtctgtggggcacaatttactcagaaaggtaacctcctccgccacattaaactg

SEQ ID NO: 3162 - DNA, 66 bp, Synthetic construct; identical to SEQ ID NO: 388
  source 1..66: mol_type = other DNA

SEQ ID NO: 3163 - DNA, 66 bp, Synthetic construct; identical to SEQ ID NO: 77
  source 1..66: mol_type = other DNA

SEQ ID NO: 3164 - DNA, 66 bp, Synthetic construct; identical to SEQ ID NO: 403
  source 1..66: mol_type = other DNA

SEQ ID NO: 3165 - DNA, 66 bp, Synthetic construct; identical to SEQ ID NO: 658
  source 1..66: mol_type = other DNA

SEQ ID NO: 3166 - DNA, 66 bp, Synthetic construct; identical to SEQ ID NO: 110
  source 1..66: mol_type = other DNA

SEQ ID NO: 3167 - DNA, 66 bp, Synthetic construct; identical to SEQ ID NO: 667
  source 1..66: mol_type = other DNA

SEQ ID NO: 3168 - DNA, 66 bp, Synthetic construct; identical to SEQ ID NO: 14
  source 1..66: mol_type = other DNA

SEQ ID NO: 3169 - DNA, 66 bp, Synthetic construct
  source 1..66: mol_type = other DNA
ttcatgtgtcccgtgtgtggggcatattttactcagaaaggtaacctcctccgccacattaaactg

SEQ ID NO: 3170 - DNA, 66 bp, Synthetic construct; identical to SEQ ID NO: 253
  source 1..66: mol_type = other DNA

SEQ ID NO: 3171 - DNA, 66 bp, Synthetic construct
  source 1..66: mol_type = other DNA
ttcggatgtgaggtgtgtggggcatattttactcagaaaggtaacctcctccgccacattaaactg

SEQ ID NO: 3172 - DNA, 66 bp, Synthetic construct; identical to SEQ ID NO: 486
  source 1..66: mol_type = other DNA

SEQ ID NO: 3173 - DNA, 66 bp, Synthetic construct; identical to SEQ ID NO: 1002
  source 1..66: mol_type = other DNA

SEQ ID NO: 3174 - DNA, 66 bp, Synthetic construct; identical to SEQ ID NO: 289
  source 1..66: mol_type = other DNA

SEQ ID NO: 3175 - DNA, 66 bp, Synthetic construct; identical to SEQ ID NO: 1280
  source 1..66: mol_type = other DNA

SEQ ID NO: 3176 - DNA, 66 bp, Synthetic construct; identical to SEQ ID NO: 1001
  source 1..66: mol_type = other DNA

SEQ ID NO: 3177 - DNA, 66 bp, Synthetic construct; identical to SEQ ID NO: 585
  source 1..66: mol_type = other DNA

SEQ ID NO: 3178 - DNA, 66 bp, Synthetic construct; identical to SEQ ID NO: 930
  source 1..66: mol_type = other DNA

SEQ ID NO: 3179 - DNA, 66 bp, Synthetic construct; identical to SEQ ID NO: 346
  source 1..66: mol_type = other DNA

SEQ ID NO: 3180 - DNA, 66 bp, Synthetic construct; identical to SEQ ID NO: 598
  source 1..66: mol_type = other DNA

SEQ ID NO: 3181 - DNA, 66 bp, Synthetic construct; identical to SEQ ID NO: 266
  source 1..66: mol_type = other DNA

SEQ ID NO: 3182 - DNA, 66 bp, Synthetic construct; identical to SEQ ID NO: 1675
  source 1..66: mol_type = other DNA

SEQ ID NO: 3183 - DNA, 66 bp, Synthetic construct; identical to SEQ ID NO: 1640
  source 1..66: mol_type = other DNA

SEQ ID NO: 3184 - DNA, 66 bp, Synthetic construct; identical to SEQ ID NO: 1141
  source 1..66: mol_type = other DNA

SEQ ID NO: 3185 - DNA, 66 bp, Synthetic construct; identical to SEQ ID NO: 1041
  source 1..66: mol_type = other DNA

SEQ ID NO: 3186 - DNA, 66 bp, Synthetic construct; identical to SEQ ID NO: 1289
  source 1..66: mol_type = other DNA

SEQ ID NO: 3187 - DNA, 66 bp, Synthetic construct; identical to SEQ ID NO: 927
  source 1..66: mol_type = other DNA

SEQ ID NO: 3188 - DNA, 66 bp, Synthetic construct; identical to SEQ ID NO: 330
  source 1..66: mol_type = other DNA

SEQ ID NO: 3189 - DNA, 66 bp, Synthetic construct; identical to SEQ ID NO: 730
  source 1..66: mol_type = other DNA

SEQ ID NO: 3190 - DNA, 66 bp, Synthetic construct; identical to SEQ ID NO: 577
  source 1..66: mol_type = other DNA

SEQ ID NO: 3191 - DNA, 66 bp, Synthetic construct; identical to SEQ ID NO: 368
  source 1..66: mol_type = other DNA

SEQ ID NO: 3192 - DNA, 66 bp, Synthetic construct; identical to SEQ ID NO: 1156
  source 1..66: mol_type = other DNA

SEQ ID NO: 3193 - DNA, 66 bp, Synthetic construct; identical to SEQ ID NO: 1421
  source 1..66: mol_type = other DNA

SEQ ID NO: 3194 - DNA, 66 bp, Synthetic construct; identical to SEQ ID NO: 495
  source 1..66: mol_type = other DNA

SEQ ID NO: 3195 - DNA, 66 bp, Synthetic construct; identical to SEQ ID NO: 613
  source 1..66: mol_type = other DNA

SEQ ID NO: 3196 - DNA, 66 bp, Synthetic construct; identical to SEQ ID NO: 860
  source 1..66: mol_type = other DNA

SEQ ID NO: 3197 - DNA, 66 bp, Synthetic construct
  source 1..66: mol_type = other DNA
ttcatgtgtgaagtctgtggggcagtttttactcagaaaggtaacctcctccgccacattaaactg

SEQ ID NO: 3198 - DNA, 66 bp, Synthetic construct; identical to SEQ ID NO: 57
  source 1..66: mol_type = other DNA

SEQ ID NO: 3199 - DNA, 66 bp, Synthetic construct; identical to SEQ ID NO: 776
  source 1..66: mol_type = other DNA

SEQ ID NO: 3200 - DNA, 66 bp, Synthetic construct
  source 1..66: mol_type = other DNA
ttctcctgtcctatatgtggggcaatctttactcagaaaggtaacctcctccgccacattaaactg

SEQ ID NO: 3201 - DNA, 66 bp, Synthetic construct; identical to SEQ ID NO: 185
  source 1..66: mol_type = other DNA

SEQ ID NO: 3202 - DNA, 66 bp, Synthetic construct; identical to SEQ ID NO: 1247
  source 1..66: mol_type = other DNA

SEQ ID NO: 3203 - DNA, 66 bp, Synthetic construct
  source 1..66: mol_type = other DNA
ttcgactgcccaatctgtggccggctgttcactcagaaaggtaacctcctccgccacattaaactg

SEQ ID NO: 3204 - DNA, 66 bp, Synthetic construct
  source 1..66: mol_type = other DNA
ttccggtgtgaacagtgtggggcaccatttactcagaaaggtaacctcctccgccacattaaactg

SEQ ID NO: 3205 - DNA, 66 bp, Synthetic construct; identical to SEQ ID NO: 428
  source 1..66: mol_type = other DNA

SEQ ID NO: 3206 - DNA, 66 bp, Synthetic construct; identical to SEQ ID NO: 292
  source 1..66: mol_type = other DNA

SEQ ID NO: 3207 - DNA, 66 bp, Synthetic construct; identical to SEQ ID NO: 1123
  source 1..66: mol_type = other DNA

SEQ ID NO: 3208 - DNA, 66 bp, Synthetic construct; identical to SEQ ID NO: 1588
  source 1..66: mol_type = other DNA

SEQ ID NO: 3209 - DNA, 66 bp, Synthetic construct; identical to SEQ ID NO: 552
  source 1..66: mol_type = other DNA

SEQ ID NO: 3210 - DNA, 66 bp, Synthetic construct; identical to SEQ ID NO: 274
  source 1..66: mol_type = other DNA

SEQ ID NO: 3211 - DNA, 66 bp, Synthetic construct; identical to SEQ ID NO: 1632
  source 1..66: mol_type = other DNA

SEQ ID NO: 3212 - DNA, 66 bp, Synthetic construct; identical to SEQ ID NO: 302
  source 1..66: mol_type = other DNA

SEQ ID NO: 3213 - DNA, 66 bp, Synthetic construct; identical to SEQ ID NO: 655
  source 1..66: mol_type = other DNA

SEQ ID NO: 3214 - DNA, 66 bp, Synthetic construct; identical to SEQ ID NO: 250
  source 1..66: mol_type = other DNA

SEQ ID NO: 3215 - DNA, 66 bp, Synthetic construct; identical to SEQ ID NO: 324
  source 1..66: mol_type = other DNA

SEQ ID NO: 3216 - DNA, 66 bp, Synthetic construct; identical to SEQ ID NO: 1373
  source 1..66: mol_type = other DNA

SEQ ID NO: 3217 - DNA, 66 bp, Synthetic construct; identical to SEQ ID NO: 207
  source 1..66: mol_type = other DNA

SEQ ID NO: 3218 - DNA, 66 bp, Synthetic construct; identical to SEQ ID NO: 1064
  source 1..66: mol_type = other DNA

SEQ ID NO: 3219 - DNA, 66 bp, Synthetic construct; identical to SEQ ID NO: 1092
  source 1..66: mol_type = other DNA

SEQ ID NO: 3220 - DNA, 66 bp, Synthetic construct
  source 1..66: mol_type = other DNA
ctgatgtgcgagatttgcgggttctgctgcactcagaaaggtaacctcctccgccacattaaactg

SEQ ID NO: 3221 - DNA, 66 bp, Synthetic construct
  source 1..66: mol_type = other DNA
ttcatttgtgagatatgtggggcaatctttactcagaaaggtaacctcctccgccacattaaactg

SEQ ID NO: 3222 - DNA, 66 bp, Synthetic construct; identical to SEQ ID NO: 242
  source 1..66: mol_type = other DNA

SEQ ID NO: 3223 - DNA, 66 bp, Synthetic construct; identical to SEQ ID NO: 28
  source 1..66: mol_type = other DNA

SEQ ID NO: 3224 - DNA, 66 bp, Synthetic construct; identical to SEQ ID NO: 881
  source 1..66: mol_type = other DNA

SEQ ID NO: 3225 - DNA, 66 bp, Synthetic construct; identical to SEQ ID NO: 16
  source 1..66: mol_type = other DNA

SEQ ID NO: 3226 - DNA, 66 bp, Synthetic construct; identical to SEQ ID NO: 562
  source 1..66: mol_type = other DNA

SEQ ID NO: 3227 - DNA, 66 bp, Synthetic construct
  source 1..66: mol_type = other DNA
ttctcttgtgaggtttgtggggcattgtttactcagaaaggtaacctcctccgccacattaaactg

SEQ ID NO: 3228 - DNA, 66 bp, Synthetic construct; identical to SEQ ID NO: 663
  source 1..66: mol_type = other DNA

SEQ ID NO: 3229 - DNA, 66 bp, Synthetic construct
  source 1..66: mol_type = other DNA
ttctgctgtcccatctgtggggcaatgtttactcagaaaggtaacctcctccgccacattaaactg

SEQ ID NO: 3230 - DNA, 66 bp, Synthetic construct; identical to SEQ ID NO: 372
  source 1..66: mol_type = other DNA

SEQ ID NO: 3231 - DNA, 66 bp, Synthetic construct; identical to SEQ ID NO: 669
  source 1..66: mol_type = other DNA

SEQ ID NO: 3232 - DNA, 66 bp, Synthetic construct
  source 1..66: mol_type = other DNA
ctgcactgcccgatttgcggcttcgtgtgcactcagaaaggtaacctcctccgccacattaaactg

SEQ ID NO: 3233 - DNA, 66 bp, Synthetic construct; identical to SEQ ID NO: 773
  source 1..66: mol_type = other DNA

SEQ ID NO: 3234 - DNA, 66 bp, Synthetic construct; identical to SEQ ID NO: 154
  source 1..66: mol_type = other DNA

SEQ ID NO: 3235 - DNA, 66 bp, Synthetic construct; identical to SEQ ID NO: 1147
  source 1..66: mol_type = other DNA

SEQ ID NO: 3236 - DNA, 66 bp, Synthetic construct; identical to SEQ ID NO: 340
  source 1..66: mol_type = other DNA

SEQ ID NO: 3237 - DNA, 66 bp, Synthetic construct; identical to SEQ ID NO: 1459
  source 1..66: mol_type = other DNA

SEQ ID NO: 3238 - DNA, 66 bp, Synthetic construct; identical to SEQ ID NO: 716
  source 1..66: mol_type = other DNA

SEQ ID NO: 3239 - DNA, 66 bp, Synthetic construct; identical to SEQ ID NO: 34
  source 1..66: mol_type = other DNA

SEQ ID NO: 3240 - DNA, 66 bp, Synthetic construct
  source 1..66: mol_type = other DNA
ttcatgtgtaatatttgtggggcaagttttactcagaaaggtaacctcctccgccacattaaactg

SEQ ID NO: 3241 - DNA, 66 bp, Synthetic construct
  source 1..66: mol_type = other DNA
ttcatttgtgaagtgtgtggggcaatgtttactcagaaaggtaacctcctccgccacattaaactg

SEQ ID NO: 3242 - DNA, 66 bp, Synthetic construct
  source 1..66: mol_type = other DNA
cttatgtgtgagatatgcggcttttactgtactcagaaaggtaacctcctccgccacattaaactg

SEQ ID NO: 3243 - DNA, 66 bp, Synthetic construct
  source 1..66: mol_type = other DNA
ttcatgtgtgacatttgtggggcacagtttactcagaaaggtaacctcctccgccacattaaactg

SEQ ID NO: 3244 - DNA, 66 bp, Synthetic construct
  source 1..66: mol_type = other DNA
ctcatgtgcgagatatgcggatttatgtgtactcagaaaggtaacctcctccgccacattaaactg

SEQ ID NO: 3245 - DNA, 66 bp, Synthetic construct; identical to SEQ ID NO: 355
  source 1..66: mol_type = other DNA

SEQ ID NO: 3246 - DNA, 66 bp, Synthetic construct
  source 1..66: mol_type = other DNA
ctgatgtgtccaatctgtggctttatgtgtactcagaaaggtaacctcctccgccacattaaactg

SEQ ID NO: 3247 - DNA, 66 bp, Synthetic construct; identical to SEQ ID NO: 333
  source 1..66: mol_type = other DNA

SEQ ID NO: 3248 - DNA, 66 bp, Synthetic construct; identical to SEQ ID NO: 7
  source 1..66: mol_type = other DNA

SEQ ID NO: 3249 - DNA, 66 bp, Synthetic construct; identical to SEQ ID NO: 1255
  source 1..66: mol_type = other DNA

SEQ ID NO: 3250 - DNA, 66 bp, Synthetic construct; identical to SEQ ID NO: 12
  source 1..66: mol_type = other DNA

SEQ ID NO: 3251 - DNA, 66 bp, Synthetic construct; identical to SEQ ID NO: 280
  source 1..66: mol_type = other DNA

SEQ ID NO: 3252 - DNA, 66 bp, Synthetic construct; identical to SEQ ID NO: 705
  source 1..66: mol_type = other DNA

SEQ ID NO: 3253 - DNA, 66 bp, Synthetic construct
  source 1..66: mol_type = other DNA
ttcatgtgtccaatctgtggggcagtgtttactcagaaaggtaacctcctccgccacattaaactg

SEQ ID NO: 3254 - DNA, 66 bp, Synthetic construct; identical to SEQ ID NO: 1184
  source 1..66: mol_type = other DNA

SEQ ID NO: 3255 - DNA, 66 bp, Synthetic construct
  source 1..66: mol_type = other DNA
ttcatgtgtgagatctgtggggcaacctttactcagaaaggtaacctcctccgccacattaaactg

SEQ ID NO: 3256 - DNA, 66 bp, Synthetic construct; identical to SEQ ID NO: 306
  source 1..66: mol_type = other DNA

SEQ ID NO: 3257 - DNA, 66 bp, Synthetic construct; identical to SEQ ID NO: 908
  source 1..66: mol_type = other DNA

SEQ ID NO: 3258 - DNA, 66 bp, Synthetic construct; identical to SEQ ID NO: 1165
  source 1..66: mol_type = other DNA

SEQ ID NO: 3259 - DNA, 66 bp, Synthetic construct; identical to SEQ ID NO: 50
  source 1..66: mol_type = other DNA

SEQ ID NO: 3260 - DNA, 66 bp, Synthetic construct
  source 1..66: mol_type = other DNA
ctgatgtgtgagatatgtggctttgtgtgcactcagaaaggtaacctcctccgccacattaaactg

SEQ ID NO: 3261 - DNA, 66 bp, Synthetic construct
  source 1..66: mol_type = other DNA
ttcatgtgtgatgtttgtggggcagcctttactcagaaaggtaacctcctccgccacattaaactg

SEQ ID NO: 3262 - DNA, 66 bp, Synthetic construct; identical to SEQ ID NO: 2281
  source 1..66: mol_type = other DNA

SEQ ID NO: 3263 - DNA, 66 bp, Synthetic construct; identical to SEQ ID NO: 1337
  source 1..66: mol_type = other DNA

SEQ ID NO: 3264 - DNA, 66 bp, Synthetic construct; identical to SEQ ID NO: 1683
  source 1..66: mol_type = other DNA

SEQ ID NO: 3265 - DNA, 66 bp, Synthetic construct
  source 1..66: mol_type = other DNA
ttctgttgtccagtctgtggggcaatgtttactcagaaaggtaacctcctccgccacattaaactg

SEQ ID NO: 3266 - DNA, 66 bp, Synthetic construct; identical to SEQ ID NO: 200
  source 1..66: mol_type = other DNA

SEQ ID NO: 3267 - DNA, 66 bp, Synthetic construct; identical to SEQ ID NO: 1274
  source 1..66: mol_type = other DNA

SEQ ID NO: 3268 - DNA, 66 bp, Synthetic construct; identical to SEQ ID NO: 1087
  source 1..66: mol_type = other DNA

SEQ ID NO: 3269 - DNA, 66 bp, Synthetic construct; identical to SEQ ID NO: 1391
  source 1..66: mol_type = other DNA

SEQ ID NO: 3270 - DNA, 66 bp, Synthetic construct; identical to SEQ ID NO: 1016
  source 1..66: mol_type = other DNA

SEQ ID NO: 3271 - DNA, 66 bp, Synthetic construct; identical to SEQ ID NO: 909
  source 1..66: mol_type = other DNA

SEQ ID NO: 3272 - DNA, 66 bp, Synthetic construct; identical to SEQ ID NO: 182
  source 1..66: mol_type = other DNA

SEQ ID NO: 3273 - DNA, 66 bp, Synthetic construct; identical to SEQ ID NO: 1323
  source 1..66: mol_type = other DNA

SEQ ID NO: 3274 - DNA, 66 bp, Synthetic construct; identical to SEQ ID NO: 171
  source 1..66: mol_type = other DNA

SEQ ID NO: 3275 - DNA, 66 bp, Synthetic construct; identical to SEQ ID NO: 871
  source 1..66: mol_type = other DNA

SEQ ID NO: 3276 - DNA, 66 bp, Synthetic construct
  source 1..66: mol_type = other DNA
ttctgttgtccggtctgtggggcactgtttactcagaaaggtaacctcctccgccacattaaactg

SEQ ID NO: 3277 - DNA, 66 bp, Synthetic construct; identical to SEQ ID NO: 509
  source 1..66: mol_type = other DNA

SEQ ID NO: 3278 - DNA, 66 bp, Synthetic construct; identical to SEQ ID NO: 285
  source 1..66: mol_type = other DNA

SEQ ID NO: 3279 - DNA, 66 bp, Synthetic construct; identical to SEQ ID NO: 413
  source 1..66: mol_type = other DNA

SEQ ID NO: 3280 - DNA, 66 bp, Synthetic construct; identical to SEQ ID NO: 748
  source 1..66: mol_type = other DNA

SEQ ID NO: 3281 - DNA, 66 bp, Synthetic construct; identical to SEQ ID NO: 1712
  source 1..66: mol_type = other DNA

SEQ ID NO: 3282 - DNA, 66 bp, Synthetic construct; identical to SEQ ID NO: 1630
  source 1..66: mol_type = other DNA

SEQ ID NO: 3283 - DNA, 66 bp, Synthetic construct; identical to SEQ ID NO: 906
  source 1..66: mol_type = other DNA

SEQ ID NO: 3284 - DNA, 66 bp, Synthetic construct
  source 1..66: mol_type = other DNA
ctgatgtgccccatctgcggattttggtgtactcagaaaggtaacctcctccgccacattaaactg

SEQ ID NO: 3285 - DNA, 66 bp, Synthetic construct; identical to SEQ ID NO: 286
  source 1..66: mol_type = other DNA

SEQ ID NO: 3286 - DNA, 66 bp, Synthetic construct; identical to SEQ ID NO: 1525
  source 1..66: mol_type = other DNA

SEQ ID NO: 3287 - DNA, 66 bp, Synthetic construct; identical to SEQ ID NO: 178
  source 1..66: mol_type = other DNA

SEQ ID NO: 3288 - DNA, 66 bp, Synthetic construct; identical to SEQ ID NO: 391
  source 1..66: mol_type = other DNA

SEQ ID NO: 3289 - DNA, 66 bp, Synthetic construct; identical to SEQ ID NO: 523
  source 1..66: mol_type = other DNA

SEQ ID NO: 3290 - DNA, 66 bp, Synthetic construct; identical to SEQ ID NO: 1194
  source 1..66: mol_type = other DNA

SEQ ID NO: 3291 - DNA, 66 bp, Synthetic construct; identical to SEQ ID NO: 975
  source 1..66: mol_type = other DNA

SEQ ID NO: 3292 - DNA, 66 bp, Synthetic construct; identical to SEQ ID NO: 1172
  source 1..66: mol_type = other DNA

SEQ ID NO: 3293 - DNA, 66 bp, Synthetic construct; identical to SEQ ID NO: 387
  source 1..66: mol_type = other DNA

SEQ ID NO: 3294 - DNA, 66 bp, Synthetic construct; identical to SEQ ID NO: 594
  source 1..66: mol_type = other DNA

SEQ ID NO: 3295 - DNA, 66 bp, Synthetic construct
  source 1..66: mol_type = other DNA
ctctgctgtccaatctgtggattcctgtgtactcagaaaggtaacctcctccgccacattaaactg

SEQ ID NO: 3296 - DNA, 66 bp, Synthetic construct
  source 1..66: mol_type = other DNA
ttcgtgtgtgaacagtgtggggcacagtttactcagaaaggtaacctcctccgccacattaaactg

SEQ ID NO: 3297 - DNA, 66 bp, Synthetic construct; identical to SEQ ID NO: 1151
  source 1..66: mol_type = other DNA

SEQ ID NO: 3298 - DNA, 66 bp, Synthetic construct; identical to SEQ ID NO: 517
  source 1..66: mol_type = other DNA

SEQ ID NO: 3299 - DNA, 66 bp, Synthetic construct; identical to SEQ ID NO: 2554
  source 1..66: mol_type = other DNA

SEQ ID NO: 3300 - DNA, 66 bp, Synthetic construct; identical to SEQ ID NO: 1376
  source 1..66: mol_type = other DNA

SEQ ID NO: 3301 - DNA, 66 bp, Synthetic construct; identical to SEQ ID NO: 711
  source 1..66: mol_type = other DNA

SEQ ID NO: 3302 - DNA, 66 bp, Synthetic construct
  source 1..66: mol_type = other DNA
ttcatgtgtgaaatctgtggggcaatatttactcagaaaggtaacctcctccgccacattaaactg

SEQ ID NO: 3303 - DNA, 66 bp, Synthetic construct; identical to SEQ ID NO: 1336
  source 1..66: mol_type = other DNA

SEQ ID NO: 3304 - DNA, 66 bp, Synthetic construct; identical to SEQ ID NO: 1241
  source 1..66: mol_type = other DNA

SEQ ID NO: 3305 - DNA, 66 bp, Synthetic construct
  source 1..66: mol_type = other DNA
ttcagctgtccacagtgtggggcatgctttactcagaaaggtaacctcctccgccacattaaactg

SEQ ID NO: 3306 - DNA, 66 bp, Synthetic construct; identical to SEQ ID NO: 1225
  source 1..66: mol_type = other DNA

SEQ ID NO: 3307 - DNA, 66 bp, Synthetic construct
  source 1..66: mol_type = other DNA
ttaatgtgcccaatctgcggctttaattgtactcagaaaggtaacctcctccgccacattaaactg

SEQ ID NO: 3308 - DNA, 66 bp, Synthetic construct
  source 1..66: mol_type = other DNA
ttctgctgtaatatttgtggggcagtatttactcagaaaggtaacctcctccgccacattaaactg

SEQ ID NO: 3309 - DNA, 66 bp, Synthetic construct
  source 1..66: mol_type = other DNA
ctgatgtgccccatatgcggatttcgatgcactcagaaaggtaacctcctccgccacattaaactg

SEQ ID NO: 3310 - DNA, 66 bp, Synthetic construct; identical to SEQ ID NO: 67
  source 1..66: mol_type = other DNA

SEQ ID NO: 3311 - DNA, 66 bp, Synthetic construct; identical to SEQ ID NO: 1754
  source 1..66: mol_type = other DNA

SEQ ID NO: 3312 - DNA, 66 bp, Synthetic construct; identical to SEQ ID NO: 44
  source 1..66: mol_type = other DNA

SEQ ID NO: 3313 - DNA, 66 bp, Synthetic construct
  source 1..66: mol_type = other DNA
cttcattgtccaatctgtgggttcccatgcactcagaaaggtaacctcctccgccacattaaactg

SEQ ID NO: 3314 - DNA, 66 bp, Synthetic construct; identical to SEQ ID NO: 317
  source 1..66: mol_type = other DNA

SEQ ID NO: 3315 - DNA, 66 bp, Synthetic construct
  source 1..66: mol_type = other DNA
ttcatgtgtcccgtgtgtggggcacactttactcagaaaggtaacctcctccgccacattaaactg

SEQ ID NO: 3316 - DNA, 66 bp, Synthetic construct; identical to SEQ ID NO: 162
  source 1..66: mol_type = other DNA

SEQ ID NO: 3317 - DNA, 66 bp, Synthetic construct
  source 1..66: mol_type = other DNA
ttccgttgtgatgtatgtggggcagcgtttactcagaaaggtaacctcctccgccacattaaactg

SEQ ID NO: 3318 - DNA, 66 bp, Synthetic construct; identical to SEQ ID NO: 1488
  source 1..66: mol_type = other DNA

SEQ ID NO: 3319 - DNA, 66 bp, Synthetic construct; identical to SEQ ID NO: 551
  source 1..66: mol_type = other DNA

SEQ ID NO: 3320 - DNA, 66 bp, Synthetic construct; identical to SEQ ID NO: 1301
  source 1..66: mol_type = other DNA

SEQ ID NO: 3321 - DNA, 66 bp, Synthetic construct; identical to SEQ ID NO: 837
  source 1..66: mol_type = other DNA

SEQ ID NO: 3322 - DNA, 66 bp, Synthetic construct; identical to SEQ ID NO: 1022
  source 1..66: mol_type = other DNA

SEQ ID NO: 3323 - DNA, 66 bp, Synthetic construct
  source 1..66: mol_type = other DNA
ctgtcctgcccaatatgtggcttcgtatgcactcagaaaggtaacctcctccgccacattaaactg

SEQ ID NO: 3324 - DNA, 66 bp, Synthetic construct
  source 1..66: mol_type = other DNA
ttccgctgtgatcagtgtggggcaccatttactcagaaaggtaacctcctccgccacattaaactg

SEQ ID NO: 3325 - DNA, 66 bp, Synthetic construct; identical to SEQ ID NO: 1139
  source 1..66: mol_type = other DNA

SEQ ID NO: 3326 - DNA, 66 bp, Synthetic construct; identical to SEQ ID NO: 1178
  source 1..66: mol_type = other DNA

SEQ ID NO: 3327 - DNA, 66 bp, Synthetic construct; identical to SEQ ID NO: 1159
  source 1..66: mol_type = other DNA

SEQ ID NO: 3328 - DNA, 66 bp, Synthetic construct; identical to SEQ ID NO: 414
  source 1..66: mol_type = other DNA

SEQ ID NO: 3329 - DNA, 66 bp, Synthetic construct; identical to SEQ ID NO: 442
  source 1..66: mol_type = other DNA

SEQ ID NO: 3330 - DNA, 66 bp, Synthetic construct; identical to SEQ ID NO: 520
  source 1..66: mol_type = other DNA

SEQ ID NO: 3331 - DNA, 66 bp, Synthetic construct; identical to SEQ ID NO: 267
  source 1..66: mol_type = other DNA

SEQ ID NO: 3332 - DNA, 66 bp, Synthetic construct; identical to SEQ ID NO: 1605
  source 1..66: mol_type = other DNA

SEQ ID NO: 3333 - DNA, 66 bp, Synthetic construct
  source 1..66: mol_type = other DNA
ttcagctgtaacatctgtggggcatgttttactcagaaaggtaacctcctccgccacattaaactg

SEQ ID NO: 3334 - DNA, 66 bp, Synthetic construct; identical to SEQ ID NO: 1068
  source 1..66: mol_type = other DNA

SEQ ID NO: 3335 - DNA, 66 bp, Synthetic construct; identical to SEQ ID NO: 1528
  source 1..66: mol_type = other DNA

SEQ ID NO: 3336 - DNA, 66 bp, Synthetic construct; identical to SEQ ID NO: 293
  source 1..66: mol_type = other DNA

SEQ ID NO: 3337 - DNA, 66 bp, Synthetic construct; identical to SEQ ID NO: 1590
  source 1..66: mol_type = other DNA

SEQ ID NO: 3338 - DNA, 66 bp, Synthetic construct; identical to SEQ ID NO: 864
  source 1..66: mol_type = other DNA

SEQ ID NO: 3339 - DNA, 66 bp, Synthetic construct; identical to SEQ ID NO: 376
  source 1..66: mol_type = other DNA

SEQ ID NO: 3340 - DNA, 66 bp, Synthetic construct; identical to SEQ ID NO: 1538
  source 1..66: mol_type = other DNA

SEQ ID NO: 3341 - DNA, 66 bp, Synthetic construct; identical to SEQ ID NO: 806
  source 1..66: mol_type = other DNA

SEQ ID NO: 3342 - DNA, 66 bp, Synthetic construct; identical to SEQ ID NO: 511
  source 1..66: mol_type = other DNA

SEQ ID NO: 3343 - DNA, 66 bp, Synthetic construct
  source 1..66: mol_type = other DNA
ttcggctgtaacatttgtggggcagtgtttactcagaaaggtaacctcctccgccacattaaactg

SEQ ID NO: 3344 - DNA, 66 bp, Synthetic construct; identical to SEQ ID NO: 749
  source 1..66: mol_type = other DNA

SEQ ID NO: 3345 - DNA, 66 bp, Synthetic construct
  source 1..66: mol_type = other DNA
ttcatgtgtgacatttgtggggcatcttttactcagaaaggtaacctcctccgccacattaaactg

SEQ ID NO: 3346 - DNA, 66 bp, Synthetic construct; identical to SEQ ID NO: 1370
  source 1..66: mol_type = other DNA

SEQ ID NO: 3347 - DNA, 66 bp, Synthetic construct; identical to SEQ ID NO: 473
  source 1..66: mol_type = other DNA

SEQ ID NO: 3348 - DNA, 66 bp, Synthetic construct; identical to SEQ ID NO: 545
  source 1..66: mol_type = other DNA

SEQ ID NO: 3349 - DNA, 66 bp, Synthetic construct; identical to SEQ ID NO: 461
  source 1..66: mol_type = other DNA

SEQ ID NO: 3350 - DNA, 66 bp, Synthetic construct; identical to SEQ ID NO: 163
  source 1..66: mol_type = other DNA

SEQ ID NO: 3351 - DNA, 66 bp, Synthetic construct; identical to SEQ ID NO: 1102
  source 1..66: mol_type = other DNA

SEQ ID NO: 3352 - DNA, 66 bp, Synthetic construct; identical to SEQ ID NO: 1523
  source 1..66: mol_type = other DNA

SEQ ID NO: 3353 - DNA, 66 bp, Synthetic construct; identical to SEQ ID NO: 1177
  source 1..66: mol_type = other DNA

SEQ ID NO: 3354 - DNA, 66 bp, Synthetic construct; identical to SEQ ID NO: 278
  source 1..66: mol_type = other DNA

SEQ ID NO: 3355 - DNA, 66 bp, Synthetic construct; identical to SEQ ID NO: 1670
  source 1..66: mol_type = other DNA

SEQ ID NO: 3356 - DNA, 66 bp, Synthetic construct; identical to SEQ ID NO: 405
  source 1..66: mol_type = other DNA

SEQ ID NO: 3357 - DNA, 66 bp, Synthetic construct
  source 1..66: mol_type = other DNA
ttcatgtgtgaagtgtgtggggcaacgtttactcagaaaggtaacctcctccgccacattaaactg

SEQ ID NO: 3358 - DNA, 66 bp, Synthetic construct
  source 1..66: mol_type = other DNA
ttcggatgtccacagtgtggggcattctttactcagaaaggtaacctcctccgccacattaaactg

SEQ ID NO: 3359 - DNA, 66 bp, Synthetic construct; identical to SEQ ID NO: 352
  source 1..66: mol_type = other DNA

SEQ ID NO: 3360 - DNA, 66 bp, Synthetic construct; identical to SEQ ID NO: 1315
  source 1..66: mol_type = other DNA

SEQ ID NO: 3361 - DNA, 66 bp, Synthetic construct; identical to SEQ ID NO: 525
  source 1..66: mol_type = other DNA

SEQ ID NO: 3362 - DNA, 66 bp, Synthetic construct; identical to SEQ ID NO: 533
  source 1..66: mol_type = other DNA

SEQ ID NO: 3363 - DNA, 66 bp, Synthetic construct; identical to SEQ ID NO: 454
  source 1..66: mol_type = other DNA

SEQ ID NO: 3364 - DNA, 66 bp, Synthetic construct
  source 1..66: mol_type = other DNA
ttctcgtgtccggtctgtggggcaatctttactcagaaaggtaacctcctccgccacattaaactg

SEQ ID NO: 3365 - DNA, 66 bp, Synthetic construct; identical to SEQ ID NO: 500
  source 1..66: mol_type = other DNA

SEQ ID NO: 3366 - DNA, 66 bp, Synthetic construct; identical to SEQ ID NO: 1425
  source 1..66: mol_type = other DNA

SEQ ID NO: 3367 - DNA, 66 bp, Synthetic construct; identical to SEQ ID NO: 1360
  source 1..66: mol_type = other DNA

SEQ ID NO: 3368 - DNA, 66 bp, Synthetic construct; identical to SEQ ID NO: 1321
  source 1..66: mol_type = other DNA

SEQ ID NO: 3369 - DNA, 66 bp, Synthetic construct
  source 1..66: mol_type = other DNA
ttcacctgtcccgtgtgtggggcaatgtttactcagaaaggtaacctcctccgccacattaaactg

SEQ ID NO: 3370 - DNA, 66 bp, Synthetic construct
  source 1..66: mol_type = other DNA
ttgatgtgtcctatctgcggatttgtgtgcactcagaaaggtaacctcctccgccacattaaactg

SEQ ID NO: 3371 - DNA, 66 bp, Synthetic construct; identical to SEQ ID NO: 400
  source 1..66: mol_type = other DNA

SEQ ID NO: 3372 - DNA, 66 bp, Synthetic construct
  source 1..66: mol_type = other DNA
ttcatgtgtcccatttgtggggcaacctttactcagaaaggtaacctcctccgccacattaaactg

SEQ ID NO: 3373 - DNA, 66 bp, Synthetic construct; identical to SEQ ID NO: 934
  source 1..66: mol_type = other DNA

SEQ ID NO: 3374 - DNA, 66 bp, Synthetic construct; identical to SEQ ID NO: 616
  source 1..66: mol_type = other DNA

SEQ ID NO: 3375 - DNA, 66 bp, Synthetic construct; identical to SEQ ID NO: 81
  source 1..66: mol_type = other DNA

SEQ ID NO: 3376 - DNA, 66 bp, Synthetic construct
  source 1..66: mol_type = other DNA
ttcctctgtcctatttgtggggcacagtttactcagaaaggtaacctcctccgccacattaaactg

SEQ ID NO: 3377 - DNA, 66 bp, Synthetic construct; identical to SEQ ID NO: 967
  source 1..66: mol_type = other DNA

SEQ ID NO: 3378 - DNA, 66 bp, Synthetic construct; identical to SEQ ID NO: 1644
  source 1..66: mol_type = other DNA

SEQ ID NO: 3379 - DNA, 66 bp, Synthetic construct
  source 1..66: mol_type = other DNA
ttctgttgtgagatttgtggggcattatttactcagaaaggtaacctcctccgccacattaaactg

SEQ ID NO: 3380 - DNA, 66 bp, Synthetic construct
  source 1..66: mol_type = other DNA
ttcatgtgtcctgtttgtggggcaatttttactcagaaaggtaacctcctccgccacattaaactg

SEQ ID NO: 3381 - DNA, 66 bp, Synthetic construct; identical to SEQ ID NO: 1093
  source 1..66: mol_type = other DNA

SEQ ID NO: 3382 - DNA, 66 bp, Synthetic construct; identical to SEQ ID NO: 1212
  source 1..66: mol_type = other DNA

SEQ ID NO: 3383 - DNA, 66 bp, Synthetic construct; identical to SEQ ID NO: 932
  source 1..66: mol_type = other DNA

SEQ ID NO: 3384 - DNA, 66 bp, Synthetic construct; identical to SEQ ID NO: 165
  source 1..66: mol_type = other DNA

SEQ ID NO: 3385 - DNA, 66 bp, Synthetic construct; identical to SEQ ID NO: 85
  source 1..66: mol_type = other DNA

SEQ ID NO: 3386 - DNA, 66 bp, Synthetic construct
  source 1..66: mol_type = other DNA
ttcatctgtccgcagtgtggggcacagtttactcagaaaggtaacctcctccgccacattaaactg

SEQ ID NO: 3387 - DNA, 66 bp, Synthetic construct; identical to SEQ ID NO: 819
  source 1..66: mol_type = other DNA

SEQ ID NO: 3388 - DNA, 66 bp, Synthetic construct; identical to SEQ ID NO: 875
  source 1..66: mol_type = other DNA

SEQ ID NO: 3389 - DNA, 66 bp, Synthetic construct
  source 1..66: mol_type = other DNA
ctgatgtgtcctatctgtgggttcatatgcactcagaaaggtaacctcctccgccacattaaactg

SEQ ID NO: 3390 - DNA, 66 bp, Synthetic construct; identical to SEQ ID NO: 210
  source 1..66: mol_type = other DNA

SEQ ID NO: 3391 - DNA, 66 bp, Synthetic construct
  source 1..66: mol_type = other DNA
ttctgttgtaacatttgtggggcaacatttactcagaaaggtaacctcctccgccacattaaactg

SEQ ID NO: 3392 - DNA, 66 bp, Synthetic construct
  source 1..66: mol_type = other DNA
ttctgttgtcctatttgtggggcattgtttactcagaaaggtaacctcctccgccacattaaactg

SEQ ID NO: 3393 - DNA, 66 bp, Synthetic construct
  source 1..66: mol_type = other DNA
ttcatctgtcccatttgtggggcaatgtttactcagaaaggtaacctcctccgccacattaaactg

SEQ ID NO: 3394 - DNA, 66 bp, Synthetic construct; identical to SEQ ID NO: 1361
  source 1..66: mol_type = other DNA

SEQ ID NO: 3395 - DNA, 66 bp, Synthetic construct; identical to SEQ ID NO: 459
  source 1..66: mol_type = other DNA

SEQ ID NO: 3396 - DNA, 66 bp, Synthetic construct; identical to SEQ ID NO: 1334
  source 1..66: mol_type = other DNA

SEQ ID NO: 3397 - DNA, 66 bp, Synthetic construct; identical to SEQ ID NO: 506
  source 1..66: mol_type = other DNA

SEQ ID NO: 3398 - DNA, 66 bp, Synthetic construct; identical to SEQ ID NO: 615
  source 1..66: mol_type = other DNA

SEQ ID NO: 3399 - DNA, 66 bp, Synthetic construct; identical to SEQ ID NO: 640
  source 1..66: mol_type = other DNA

SEQ ID NO: 3400 - DNA, 66 bp, Synthetic construct; identical to SEQ ID NO: 213
  source 1..66: mol_type = other DNA

SEQ ID NO: 3401 - DNA, 66 bp, Synthetic construct; identical to SEQ ID NO: 59
  source 1..66: mol_type = other DNA

SEQ ID NO: 3402 - DNA, 66 bp, Synthetic construct
  source 1..66: mol_type = other DNA
ttcatctgtgaagtctgtggggcaatttttactcagaaaggtaacctcctccgccacattaaactg

SEQ ID NO: 3403 - DNA, 66 bp, Synthetic construct; identical to SEQ ID NO: 1493
  source 1..66: mol_type = other DNA

SEQ ID NO: 3404 - DNA, 66 bp, Synthetic construct; identical to SEQ ID NO: 88
  source 1..66: mol_type = other DNA

SEQ ID NO: 3405 - DNA, 66 bp, Synthetic construct; identical to SEQ ID NO: 1728
  source 1..66: mol_type = other DNA

SEQ ID NO: 3406 - DNA, 66 bp, Synthetic construct; identical to SEQ ID NO: 195
  source 1..66: mol_type = other DNA

SEQ ID NO: 3407 - DNA, 66 bp, Synthetic construct; identical to SEQ ID NO: 636
  source 1..66: mol_type = other DNA

SEQ ID NO: 3408 - DNA, 66 bp, Synthetic construct; identical to SEQ ID NO: 243
  source 1..66: mol_type = other DNA

SEQ ID NO: 3409 - DNA, 66 bp, Synthetic construct; identical to SEQ ID NO: 571
  source 1..66: mol_type = other DNA

SEQ ID NO: 3410 - DNA, 66 bp, Synthetic construct; identical to SEQ ID NO: 647
  source 1..66: mol_type = other DNA

SEQ ID NO: 3411 - DNA, 66 bp, Synthetic construct
  source 1..66: mol_type = other DNA
ttcagctgtaacatttgtggggcagtgtttactcagaaaggtaacctcctccgccacattaaactg

SEQ ID NO: 3412 - DNA, 66 bp, Synthetic construct; identical to SEQ ID NO: 2419
  source 1..66: mol_type = other DNA

SEQ ID NO: 3413 - DNA, 66 bp, Synthetic construct; identical to SEQ ID NO: 1271
  source 1..66: mol_type = other DNA

SEQ ID NO: 3414 - DNA, 66 bp, Synthetic construct
  source 1..66: mol_type = other DNA
ttcatttgtgagcagtgtggggcacagtttactcagaaaggtaacctcctccgccacattaaactg

SEQ ID NO: 3415 - DNA, 66 bp, Synthetic construct
  source 1..66: mol_type = other DNA
ttcctgtgtgatatctgtggggcaccatttactcagaaaggtaacctcctccgccacattaaactg

SEQ ID NO: 3416 - DNA, 66 bp, Synthetic construct; identical to SEQ ID NO: 19
  source 1..66: mol_type = other DNA

SEQ ID NO: 3417 - DNA, 66 bp, Synthetic construct; identical to SEQ ID NO: 2679
  source 1..66: mol_type = other DNA

SEQ ID NO: 3418 - DNA, 66 bp, Synthetic construct; identical to SEQ ID NO: 674
  source 1..66: mol_type = other DNA

SEQ ID NO: 3419 - DNA, 66 bp, Synthetic construct
  source 1..66: mol_type = other DNA
ttcggatgtaatatctgtggggcatactttactcagaaaggtaacctcctccgccacattaaactg

SEQ ID NO: 3420 - DNA, 66 bp, Synthetic construct; identical to SEQ ID NO: 493
  source 1..66: mol_type = other DNA

SEQ ID NO: 3421 - DNA, 66 bp, Synthetic construct; identical to SEQ ID NO: 877
  source 1..66: mol_type = other DNA

SEQ ID NO: 3422 - DNA, 66 bp, Synthetic construct; identical to SEQ ID NO: 1136
  source 1..66: mol_type = other DNA

SEQ ID NO: 3423 - DNA, 66 bp, Synthetic construct
  source 1..66: mol_type = other DNA
ttcatgtgtgatgtttgtggggcatcctttactcagaaaggtaacctcctccgccacattaaactg

SEQ ID NO: 3424 - DNA, 66 bp, Synthetic construct; identical to SEQ ID NO: 181
  source 1..66: mol_type = other DNA

SEQ ID NO: 3425 - DNA, 66 bp, Synthetic construct; identical to SEQ ID NO: 1254
  source 1..66: mol_type = other DNA

SEQ ID NO: 3426 - DNA, 66 bp, Synthetic construct; identical to SEQ ID NO: 455
  source 1..66: mol_type = other DNA

SEQ ID NO: 3427 - DNA, 66 bp, Synthetic construct
  source 1..66: mol_type = other DNA
ttcatgtgtgaaatctgtggggcagagtttactcagaaaggtaacctcctccgccacattaaactg

SEQ ID NO: 3428 - DNA, 66 bp, Synthetic construct; identical to SEQ ID NO: 303
  source 1..66: mol_type = other DNA

SEQ ID NO: 3429 - DNA, 66 bp, Synthetic construct
  source 1..66: mol_type = other DNA
ttcatgtgtaacatatgtggggcacagtttactcagaaaggtaacctcctccgccacattaaactg

SEQ ID NO: 3430 - DNA, 66 bp, Synthetic construct; identical to SEQ ID NO: 770
  source 1..66: mol_type = other DNA

SEQ ID NO: 3431 - DNA, 66 bp, Synthetic construct; identical to SEQ ID NO: 410
  source 1..66: mol_type = other DNA

SEQ ID NO: 3432 - DNA, 66 bp, Synthetic construct; identical to SEQ ID NO: 1401
  source 1..66: mol_type = other DNA

SEQ ID NO: 3433 - DNA, 66 bp, Synthetic construct; identical to SEQ ID NO: 487
  source 1..66: mol_type = other DNA

SEQ ID NO: 3434 - DNA, 66 bp, Synthetic construct
  source 1..66: mol_type = other DNA
ttctgctgtccgcagtgtggggcatgctttactcagaaaggtaacctcctccgccacattaaactg

SEQ ID NO: 3435 - DNA, 66 bp, Synthetic construct; identical to SEQ ID NO: 406
  source 1..66: mol_type = other DNA

SEQ ID NO: 3436 - DNA, 66 bp, Synthetic construct; identical to SEQ ID NO: 678
  source 1..66: mol_type = other DNA

SEQ ID NO: 3437 - DNA, 66 bp, Synthetic construct; identical to SEQ ID NO: 953
  source 1..66: mol_type = other DNA

SEQ ID NO: 3438 - DNA, 66 bp, Synthetic construct; identical to SEQ ID NO: 18
  source 1..66: mol_type = other DNA

SEQ ID NO: 3439 - DNA, 66 bp, Synthetic construct; identical to SEQ ID NO: 2620
  source 1..66: mol_type = other DNA

SEQ ID NO: 3440 - DNA, 66 bp, Synthetic construct; identical to SEQ ID NO: 329
  source 1..66: mol_type = other DNA

SEQ ID NO: 3441 - DNA, 66 bp, Synthetic construct
  source 1..66: mol_type = other DNA
ttcatgtgtccaatctgtggggcacattttactcagaaaggtaacctcctccgccacattaaactg

SEQ ID NO: 3442 - DNA, 66 bp, Synthetic construct; identical to SEQ ID NO: 1063
  source 1..66: mol_type = other DNA

SEQ ID NO: 3443 - DNA, 66 bp, Synthetic construct; identical to SEQ ID NO: 1091
  source 1..66: mol_type = other DNA

SEQ ID NO: 3444 - DNA, 66 bp, Synthetic construct
  source 1..66: mol_type = other DNA
ttcatgtgtaacatttgtggggcaggttttactcagaaaggtaacctcctccgccacattaaactg

SEQ ID NO: 3445 - DNA, 66 bp, Synthetic construct; identical to SEQ ID NO: 638
  source 1..66: mol_type = other DNA

SEQ ID NO: 3446 - DNA, 66 bp, Synthetic construct; identical to SEQ ID NO: 1453
  source 1..66: mol_type = other DNA

SEQ ID NO: 3447 - DNA, 66 bp, Synthetic construct
  source 1..66: mol_type = other DNA
ttcatatgtaacgtgtgtggggcacagtttactcagaaaggtaacctcctccgccacattaaactg

SEQ ID NO: 3448 - DNA, 66 bp, Synthetic construct; identical to SEQ ID NO: 300
  source 1..66: mol_type = other DNA

SEQ ID NO: 3449 - DNA, 66 bp, Synthetic construct
  source 1..66: mol_type = other DNA
ttcatgtgtaacgtgtgtggggcagcctttactcagaaaggtaacctcctccgccacattaaactg

SEQ ID NO: 3450 - DNA, 66 bp, Synthetic construct; identical to SEQ ID NO: 1396
  source 1..66: mol_type = other DNA

SEQ ID NO: 3451 - DNA, 66 bp, Synthetic construct; identical to SEQ ID NO: 1111
  source 1..66: mol_type = other DNA

SEQ ID NO: 3452 - DNA, 66 bp, Synthetic construct; identical to SEQ ID NO: 859
  source 1..66: mol_type = other DNA

SEQ ID NO: 3453 - DNA, 66 bp, Synthetic construct; identical to SEQ ID NO: 53
  source 1..66: mol_type = other DNA

SEQ ID NO: 3454 - DNA, 66 bp, Synthetic construct; identical to SEQ ID NO: 201
  source 1..66: mol_type = other DNA

SEQ ID NO: 3455 - DNA, 66 bp, Synthetic construct; identical to SEQ ID NO: 735
  source 1..66: mol_type = other DNA

SEQ ID NO: 3456 - DNA, 66 bp, Synthetic construct; identical to SEQ ID NO: 693
  source 1..66: mol_type = other DNA

SEQ ID NO: 3457 - DNA, 66 bp, Synthetic construct; identical to SEQ ID NO: 1112
  source 1..66: mol_type = other DNA

SEQ ID NO: 3458 - DNA, 66 bp, Synthetic construct; identical to SEQ ID NO: 946
  source 1..66: mol_type = other DNA

SEQ ID NO: 3459 - DNA, 66 bp, Synthetic construct; identical to SEQ ID NO: 871
  source 1..66: mol_type = other DNA

SEQ ID NO: 3460 - DNA, 66 bp, Synthetic construct; identical to SEQ ID NO: 1880
  source 1..66: mol_type = other DNA

SEQ ID NO: 3461 - DNA, 66 bp, Synthetic construct; identical to SEQ ID NO: 1015
  source 1..66: mol_type = other DNA

SEQ ID NO: 3462 - DNA, 66 bp, Synthetic construct; identical to SEQ ID NO: 808
  source 1..66: mol_type = other DNA

SEQ ID NO: 3463 - DNA, 66 bp, Synthetic construct; identical to SEQ ID NO: 793
  source 1..66: mol_type = other DNA

SEQ ID NO: 3464 - DNA, 66 bp, Synthetic construct; identical to SEQ ID NO: 975
  source 1..66: mol_type = other DNA

SEQ ID NO: 3465 - DNA, 66 bp, Synthetic construct; identical to SEQ ID NO: 1139
  source 1..66: mol_type = other DNA

SEQ ID NO: 3466 - DNA, 66 bp, Synthetic construct; identical to SEQ ID NO: 1382
  source 1..66: mol_type = other DNA

SEQ ID NO: 3467 - DNA, 66 bp, Synthetic construct; identical to SEQ ID NO: 792
  source 1..66: mol_type = other DNA

SEQ ID NO: 3468 - DNA, 66 bp, Synthetic construct; identical to SEQ ID NO: 763
  source 1..66: mol_type = other DNA

SEQ ID NO: 3469 - DNA, 66 bp, Synthetic construct; identical to SEQ ID NO: 785
  source 1..66: mol_type = other DNA

SEQ ID NO: 3470 - DNA, 66 bp, Synthetic construct; identical to SEQ ID NO: 788
  source 1..66: mol_type = other DNA

SEQ ID NO: 3471 - DNA, 66 bp, Synthetic construct; identical to SEQ ID NO: 1084
  source 1..66: mol_type = other DNA

SEQ ID NO: 3472 - DNA, 66 bp, Synthetic construct; identical to SEQ ID NO: 955
  source 1..66: mol_type = other DNA

SEQ ID NO: 3473 - DNA, 66 bp, Synthetic construct; identical to SEQ ID NO: 777
  source 1..66: mol_type = other DNA

SEQ ID NO: 3474 - DNA, 66 bp, Synthetic construct; identical to SEQ ID NO: 1010
  source 1..66: mol_type = other DNA

SEQ ID NO: 3475 - DNA, 66 bp, Synthetic construct; identical to SEQ ID NO: 776
  source 1..66: mol_type = other DNA

SEQ ID NO: 3476 - DNA, 66 bp, Synthetic construct; identical to SEQ ID NO: 870
  source 1..66: mol_type = other DNA

SEQ ID NO: 3477 - DNA, 66 bp, Synthetic construct; identical to SEQ ID NO: 774
  source 1..66: mol_type = other DNA

SEQ ID NO: 3478 - DNA, 66 bp, Synthetic construct; identical to SEQ ID NO: 740
  source 1..66: mol_type = other DNA

SEQ ID NO: 3479 - DNA, 66 bp, Synthetic construct; identical to SEQ ID NO: 818
  source 1..66: mol_type = other DNA

SEQ ID NO: 3480 - DNA, 66 bp, Synthetic construct; identical to SEQ ID NO: 1434
  source 1..66: mol_type = other DNA

SEQ ID NO: 3481 - DNA, 66 bp, Synthetic construct; identical to SEQ ID NO: 854
  source 1..66: mol_type = other DNA

SEQ ID NO: 3482 - DNA, 66 bp, Synthetic construct; identical to SEQ ID NO: 909
  source 1..66: mol_type = other DNA

SEQ ID NO: 3483 - DNA, 66 bp, Synthetic construct; identical to SEQ ID NO: 927
  source 1..66: mol_type = other DNA

SEQ ID NO: 3484 - DNA, 66 bp, Synthetic construct; identical to SEQ ID NO: 827
  source 1..66: mol_type = other DNA

SEQ ID NO: 3485 - DNA, 66 bp, Synthetic construct; identical to SEQ ID NO: 69
  source 1..66: mol_type = other DNA

SEQ ID NO: 3486 - DNA, 66 bp, Synthetic construct; identical to SEQ ID NO: 908
  source 1..66: mol_type = other DNA

SEQ ID NO: 3487 - DNA, 66 bp, Synthetic construct; identical to SEQ ID NO: 758
  source 1..66: mol_type = other DNA

SEQ ID NO: 3488 - DNA, 66 bp, Synthetic construct; identical to SEQ ID NO: 1328
  source 1..66: mol_type = other DNA

SEQ ID NO: 3489 - DNA, 66 bp, Synthetic construct; identical to SEQ ID NO: 498
  source 1..66: mol_type = other DNA

SEQ ID NO: 3490 - DNA, 66 bp, Synthetic construct; identical to SEQ ID NO: 1352
  source 1..66: mol_type = other DNA

SEQ ID NO: 3491 - DNA, 66 bp, Synthetic construct; identical to SEQ ID NO: 1140
  source 1..66: mol_type = other DNA

SEQ ID NO: 3492 - DNA, 66 bp, Synthetic construct; identical to SEQ ID NO: 842
  source 1..66: mol_type = other DNA

SEQ ID NO: 3493 - DNA, 66 bp, Synthetic construct; identical to SEQ ID NO: 378
  source 1..66: mol_type = other DNA

SEQ ID NO: 3494 - DNA, 66 bp, Synthetic construct; identical to SEQ ID NO: 692
  source 1..66: mol_type = other DNA

SEQ ID NO: 3495 - DNA, 66 bp, Synthetic construct; identical to SEQ ID NO: 885
  source 1..66: mol_type = other DNA

SEQ ID NO: 3496 - DNA, 66 bp, Synthetic construct; identical to SEQ ID NO: 632
  source 1..66: mol_type = other DNA

SEQ ID NO: 3497 - DNA, 66 bp, Synthetic construct; identical to SEQ ID NO: 1293
  source 1..66: mol_type = other DNA

SEQ ID NO: 3498 - DNA, 66 bp, Synthetic construct; identical to SEQ ID NO: 725
  source 1..66: mol_type = other DNA

SEQ ID NO: 3499 - DNA, 66 bp, Synthetic construct; identical to SEQ ID NO: 767
  source 1..66: mol_type = other DNA

SEQ ID NO: 3500 - DNA, 66 bp, Synthetic construct; identical to SEQ ID NO: 803
  source 1..66: mol_type = other DNA

SEQ ID NO: 3501 - DNA, 66 bp, Synthetic construct; identical to SEQ ID NO: 491
  source 1..66: mol_type = other DNA

SEQ ID NO: 3502 - DNA, 66 bp, Synthetic construct; identical to SEQ ID NO: 1042
  source 1..66: mol_type = other DNA

SEQ ID NO: 3503 - DNA, 66 bp, Synthetic construct; identical to SEQ ID NO: 1286
  source 1..66: mol_type = other DNA

SEQ ID NO: 3504 - DNA, 66 bp, Synthetic construct; identical to SEQ ID NO: 1008
  source 1..66: mol_type = other DNA

SEQ ID NO: 3505 - DNA, 66 bp, Synthetic construct; identical to SEQ ID NO: 1164
  source 1..66: mol_type = other DNA

SEQ ID NO: 3506 - DNA, 66 bp, Synthetic construct; identical to SEQ ID NO: 1099
  source 1..66: mol_type = other DNA

SEQ ID NO: 3507 - DNA, 66 bp, Synthetic construct; identical to SEQ ID NO: 77
  source 1..66: mol_type = other DNA

SEQ ID NO: 3508 - DNA, 66 bp, Synthetic construct; identical to SEQ ID NO: 794
  source 1..66: mol_type = other DNA

SEQ ID NO: 3509 - DNA, 66 bp, Synthetic construct; identical to SEQ ID NO: 1248
  source 1..66: mol_type = other DNA

SEQ ID NO: 3510 - DNA, 66 bp, Synthetic construct; identical to SEQ ID NO: 439
  source 1..66: mol_type = other DNA

SEQ ID NO: 3511 - DNA, 66 bp, Synthetic construct; identical to SEQ ID NO: 816
  source 1..66: mol_type = other DNA

SEQ ID NO: 3512 - DNA, 66 bp, Synthetic construct; identical to SEQ ID NO: 1104
  source 1..66: mol_type = other DNA

SEQ ID NO: 3513 - DNA, 66 bp, Synthetic construct; identical to SEQ ID NO: 1133
  source 1..66: mol_type = other DNA

SEQ ID NO: 3514 - DNA, 66 bp, Synthetic construct; identical to SEQ ID NO: 1311
  source 1..66: mol_type = other DNA

SEQ ID NO: 3515 - DNA, 66 bp, Synthetic construct; identical to SEQ ID NO: 884
  source 1..66: mol_type = other DNA

SEQ ID NO: 3516 - DNA, 66 bp, Synthetic construct; identical to SEQ ID NO: 913
  source 1..66: mol_type = other DNA

SEQ ID NO: 3517 - DNA, 66 bp, Synthetic construct; identical to SEQ ID NO: 1297
  source 1..66: mol_type = other DNA

SEQ ID NO: 3518 - DNA, 66 bp, Synthetic construct; identical to SEQ ID NO: 896
  source 1..66: mol_type = other DNA

SEQ ID NO: 3519 - DNA, 66 bp, Synthetic construct; identical to SEQ ID NO: 786
  source 1..66: mol_type = other DNA

SEQ ID NO: 3520 - DNA, 66 bp, Synthetic construct; identical to SEQ ID NO: 177
  source 1..66: mol_type = other DNA

SEQ ID NO: 3521 - DNA, 66 bp, Synthetic construct; identical to SEQ ID NO: 986
  source 1..66: mol_type = other DNA

SEQ ID NO: 3522 - DNA, 66 bp, Synthetic construct; identical to SEQ ID NO: 1238
  source 1..66: mol_type = other DNA

SEQ ID NO: 3523 - DNA, 66 bp, Synthetic construct; identical to SEQ ID NO: 874
  source 1..66: mol_type = other DNA

SEQ ID NO: 3524 - DNA, 66 bp, Synthetic construct; identical to SEQ ID NO: 1179
  source 1..66: mol_type = other DNA

SEQ ID NO: 3525 - DNA, 66 bp, Synthetic construct; identical to SEQ ID NO: 569
  source 1..66: mol_type = other DNA

SEQ ID NO: 3526 - DNA, 66 bp, Synthetic construct; identical to SEQ ID NO: 1001
  source 1..66: mol_type = other DNA

SEQ ID NO: 3527 - DNA, 66 bp, Synthetic construct; identical to SEQ ID NO: 892
  source 1..66: mol_type = other DNA

SEQ ID NO: 3528 - DNA, 66 bp, Synthetic construct; identical to SEQ ID NO: 404
  source 1..66: mol_type = other DNA

SEQ ID NO: 3529 - DNA, 66 bp, Synthetic construct; identical to SEQ ID NO: 1130
  source 1..66: mol_type = other DNA

SEQ ID NO: 3530 - DNA, 66 bp, Synthetic construct; identical to SEQ ID NO: 972
  source 1..66: mol_type = other DNA

SEQ ID NO: 3531 - DNA, 66 bp, Synthetic construct; identical to SEQ ID NO: 48
  source 1..66: mol_type = other DNA

SEQ ID NO: 3532 - DNA, 66 bp, Synthetic construct; identical to SEQ ID NO: 1107
  source 1..66: mol_type = other DNA

SEQ ID NO: 3533 - DNA, 66 bp, Synthetic construct; identical to SEQ ID NO: 1609
  source 1..66: mol_type = other DNA

SEQ ID NO: 3534 - DNA, 66 bp, Synthetic construct; identical to SEQ ID NO: 33
  source 1..66: mol_type = other DNA

SEQ ID NO: 3535 - DNA, 66 bp, Synthetic construct; identical to SEQ ID NO: 74
  source 1..66: mol_type = other DNA

SEQ ID NO: 3536 - DNA, 66 bp, Synthetic construct; identical to SEQ ID NO: 207
  source 1..66: mol_type = other DNA

SEQ ID NO: 3537 - DNA, 66 bp, Synthetic construct; identical to SEQ ID NO: 19
  source 1..66: mol_type = other DNA

SEQ ID NO: 3538 - DNA, 66 bp, Synthetic construct; identical to SEQ ID NO: 1291
  source 1..66: mol_type = other DNA

SEQ ID NO: 3539 - DNA, 66 bp, Synthetic construct; identical to SEQ ID NO: 935
  source 1..66: mol_type = other DNA

SEQ ID NO: 3540 - DNA, 66 bp, Synthetic construct; identical to SEQ ID NO: 800
  source 1..66: mol_type = other DNA

SEQ ID NO: 3541 - DNA, 66 bp, Synthetic construct; identical to SEQ ID NO: 32
  source 1..66: mol_type = other DNA

SEQ ID NO: 3542 - DNA, 66 bp, Synthetic construct; identical to SEQ ID NO: 956
  source 1..66: mol_type = other DNA

SEQ ID NO: 3543 - DNA, 66 bp, Synthetic construct; identical to SEQ ID NO: 820
  source 1..66: mol_type = other DNA

SEQ ID NO: 3544 - DNA, 66 bp, Synthetic construct; identical to SEQ ID NO: 40
  source 1..66: mol_type = other DNA

SEQ ID NO: 3545 - DNA, 66 bp, Synthetic construct; identical to SEQ ID NO: 1232
  source 1..66: mol_type = other DNA

SEQ ID NO: 3546 - DNA, 66 bp, Synthetic construct; identical to SEQ ID NO: 1757
  source 1..66: mol_type = other DNA

SEQ ID NO: 3547 - DNA, 66 bp, Synthetic construct; identical to SEQ ID NO: 852
  source 1..66: mol_type = other DNA

SEQ ID NO: 3548 - DNA, 66 bp, Synthetic construct; identical to SEQ ID NO: 255
  source 1..66: mol_type = other DNA

SEQ ID NO: 3549 - DNA, 66 bp, Synthetic construct; identical to SEQ ID NO: 886
  source 1..66: mol_type = other DNA

SEQ ID NO: 3550 - DNA, 66 bp, Synthetic construct; identical to SEQ ID NO: 1048
  source 1..66: mol_type = other DNA

SEQ ID NO: 3551 - DNA, 66 bp, Synthetic construct; identical to SEQ ID NO: 555
  source 1..66: mol_type = other DNA

SEQ ID NO: 3552 - DNA, 66 bp, Synthetic construct; identical to SEQ ID NO: 1643
  source 1..66: mol_type = other DNA

SEQ ID NO: 3553 - DNA, 66 bp, Synthetic construct; identical to SEQ ID NO: 770
  source 1..66: mol_type = other DNA

SEQ ID NO: 3554 - DNA, 66 bp, Synthetic construct; identical to SEQ ID NO: 1051
  source 1..66: mol_type = other DNA

SEQ ID NO: 3555 - DNA, 66 bp, Synthetic construct; identical to SEQ ID NO: 867
  source 1..66: mol_type = other DNA

SEQ ID NO: 3556 - DNA, 66 bp, Synthetic construct; identical to SEQ ID NO: 1102
  source 1..66: mol_type = other DNA

SEQ ID NO: 3557 - DNA, 66 bp, Synthetic construct; identical to SEQ ID NO: 912
  source 1..66: mol_type = other DNA

SEQ ID NO: 3558 - DNA, 66 bp, Synthetic construct; identical to SEQ ID NO: 334
  source 1..66: mol_type = other DNA

SEQ ID NO: 3559 - DNA, 66 bp, Synthetic construct; identical to SEQ ID NO: 1068
  source 1..66: mol_type = other DNA

SEQ ID NO: 3560 - DNA, 66 bp, Synthetic construct; identical to SEQ ID NO: 421
  source 1..66: mol_type = other DNA

SEQ ID NO: 3561 - DNA, 66 bp, Synthetic construct; identical to SEQ ID NO: 1077
  source 1..66: mol_type = other DNA

SEQ ID NO: 3562 - DNA, 66 bp, Synthetic construct; identical to SEQ ID NO: 675
  source 1..66: mol_type = other DNA

SEQ ID NO: 3563 - DNA, 66 bp, Synthetic construct; identical to SEQ ID NO: 380
  source 1..66: mol_type = other DNA

SEQ ID NO: 3564 - DNA, 66 bp, Synthetic construct; identical to SEQ ID NO: 787
  source 1..66: mol_type = other DNA

SEQ ID NO: 3565 - DNA, 66 bp, Synthetic construct; identical to SEQ ID NO: 1423
  source 1..66: mol_type = other DNA

SEQ ID NO: 3566 - DNA, 66 bp, Synthetic construct; identical to SEQ ID NO: 769
  source 1..66: mol_type = other DNA

SEQ ID NO: 3567 - DNA, 66 bp, Synthetic construct; identical to SEQ ID NO: 1426
  source 1..66: mol_type = other DNA

SEQ ID NO: 3568 - DNA, 66 bp, Synthetic construct; identical to SEQ ID NO: 1339
  source 1..66: mol_type = other DNA

SEQ ID NO: 3569 - DNA, 66 bp, Synthetic construct; identical to SEQ ID NO: 1895
  source 1..66: mol_type = other DNA

SEQ ID NO: 3570 - DNA, 66 bp, Synthetic construct; identical to SEQ ID NO: 89
  source 1..66: mol_type = other DNA

SEQ ID NO: 3571 - DNA, 66 bp, Synthetic construct; identical to SEQ ID NO: 73
  source 1..66: mol_type = other DNA

SEQ ID NO: 3572 - DNA, 66 bp, Synthetic construct; identical to SEQ ID NO: 91
  source 1..66: mol_type = other DNA

SEQ ID NO: 3573 - DNA, 66 bp, Synthetic construct; identical to SEQ ID NO: 921
  source 1..66: mol_type = other DNA

SEQ ID NO: 3574 - DNA, 66 bp, Synthetic construct; identical to SEQ ID NO: 1806
  source 1..66: mol_type = other DNA

SEQ ID NO: 3575 - DNA, 66 bp, Synthetic construct; identical to SEQ ID NO: 1145
  source 1..66: mol_type = other DNA

SEQ ID NO: 3576 - DNA, 66 bp, Synthetic construct; identical to SEQ ID NO: 1046
  source 1..66: mol_type = other DNA

SEQ ID NO: 3577 - DNA, 66 bp, Synthetic construct; identical to SEQ ID NO: 1388
  source 1..66: mol_type = other DNA

SEQ ID NO: 3578 - DNA, 66 bp, Synthetic construct; identical to SEQ ID NO: 872
  source 1..66: mol_type = other DNA

SEQ ID NO: 3579 - DNA, 66 bp, Synthetic construct; identical to SEQ ID NO: 1464
  source 1..66: mol_type = other DNA

SEQ ID NO: 3580 - DNA, 66 bp, Synthetic construct; identical to SEQ ID NO: 327
  source 1..66: mol_type = other DNA

SEQ ID NO: 3581 - DNA, 66 bp, Synthetic construct; identical to SEQ ID NO: 1384
  source 1..66: mol_type = other DNA

SEQ ID NO: 3582 - DNA, 66 bp, Synthetic construct; identical to SEQ ID NO: 922
  source 1..66: mol_type = other DNA

SEQ ID NO: 3583 - DNA, 66 bp, Synthetic construct; identical to SEQ ID NO: 612
  source 1..66: mol_type = other DNA

SEQ ID NO: 3584 - DNA, 66 bp, Synthetic construct; identical to SEQ ID NO: 971
  source 1..66: mol_type = other DNA

SEQ ID NO: 3585 - DNA, 66 bp, Synthetic construct; identical to SEQ ID NO: 1073
  source 1..66: mol_type = other DNA

SEQ ID NO: 3586 - DNA, 66 bp, Synthetic construct; identical to SEQ ID NO: 941
  source 1..66: mol_type = other DNA

SEQ ID NO: 3587 - DNA, 66 bp, Synthetic construct; identical to SEQ ID NO: 1519
  source 1..66: mol_type = other DNA

SEQ ID NO: 3588 - DNA, 66 bp, Synthetic construct; identical to SEQ ID NO: 1054
  source 1..66: mol_type = other DNA

SEQ ID NO: 3589 - DNA, 66 bp, Synthetic construct; identical to SEQ ID NO: 642
  source 1..66: mol_type = other DNA

SEQ ID NO: 3590 - DNA, 66 bp, Synthetic construct; identical to SEQ ID NO: 1002
  source 1..66: mol_type = other DNA

SEQ ID NO: 3591 - DNA, 66 bp, Synthetic construct; identical to SEQ ID NO: 64
  source 1..66: mol_type = other DNA

SEQ ID NO: 3592 - DNA, 66 bp, Synthetic construct; identical to SEQ ID NO: 840
  source 1..66: mol_type = other DNA

SEQ ID NO: 3593 - DNA, 66 bp, Synthetic construct; identical to SEQ ID NO: 247
  source 1..66: mol_type = other DNA

SEQ ID NO: 3594 - DNA, 66 bp, Synthetic construct; identical to SEQ ID NO: 1098
  source 1..66: mol_type = other DNA

SEQ ID NO: 3595 - DNA, 66 bp, Synthetic construct; identical to SEQ ID NO: 451
  source 1..66: mol_type = other DNA

SEQ ID NO: 3596 - DNA, 66 bp, Synthetic construct; identical to SEQ ID NO: 104
  source 1..66: mol_type = other DNA

SEQ ID NO: 3597 - DNA, 66 bp, Synthetic construct; identical to SEQ ID NO: 1235
  source 1..66: mol_type = other DNA

SEQ ID NO: 3598 - DNA, 66 bp, Synthetic construct; identical to SEQ ID NO: 1343
  source 1..66: mol_type = other DNA

SEQ ID NO: 3599 - DNA, 66 bp, Synthetic construct; identical to SEQ ID NO: 173
  source 1..66: mol_type = other DNA

SEQ ID NO: 3600 - DNA, 66 bp, Synthetic construct; identical to SEQ ID NO: 1372
  source 1..66: mol_type = other DNA

SEQ ID NO: 3601 - DNA, 66 bp, Synthetic construct; identical to SEQ ID NO: 991
  source 1..66: mol_type = other DNA

SEQ ID NO: 3602 - DNA, 66 bp, Synthetic construct; identical to SEQ ID NO: 1110
  source 1..66: mol_type = other DNA

SEQ ID NO: 3603 - DNA, 66 bp, Synthetic construct; identical to SEQ ID NO: 1317
  source 1..66: mol_type = other DNA

SEQ ID NO: 3604 - DNA, 66 bp, Synthetic construct; identical to SEQ ID NO: 480
  source 1..66: mol_type = other DNA

SEQ ID NO: 3605 - DNA, 66 bp, Synthetic construct; identical to SEQ ID NO: 1060
  source 1..66: mol_type = other DNA

SEQ ID NO: 3606 - DNA, 66 bp, Synthetic construct; identical to SEQ ID NO: 603
  source 1..66: mol_type = other DNA

SEQ ID NO: 3607 - DNA, 66 bp, Synthetic construct; identical to SEQ ID NO: 756
  source 1..66: mol_type = other DNA

SEQ ID NO: 3608 - DNA, 66 bp, Synthetic construct; identical to SEQ ID NO: 1092
  source 1..66: mol_type = other DNA

SEQ ID NO: 3609 - DNA, 66 bp, Synthetic construct; identical to SEQ ID NO: 1231
  source 1..66: mol_type = other DNA

SEQ ID NO: 3610 - DNA, 66 bp, Synthetic construct; identical to SEQ ID NO: 809
  source 1..66: mol_type = other DNA

SEQ ID NO: 3611 - DNA, 66 bp, Synthetic construct; identical to SEQ ID NO: 1009
  source 1..66: mol_type = other DNA

SEQ ID NO: 3612 - DNA, 66 bp, Synthetic construct; identical to SEQ ID NO: 1711
  source 1..66: mol_type = other DNA

SEQ ID NO: 3613 - DNA, 66 bp, Synthetic construct; identical to SEQ ID NO: 1275
  source 1..66: mol_type = other DNA

SEQ ID NO: 3614 - DNA, 66 bp, Synthetic construct; identical to SEQ ID NO: 933
  source 1..66: mol_type = other DNA

SEQ ID NO: 3615 - DNA, 66 bp, Synthetic construct; identical to SEQ ID NO: 140
  source 1..66: mol_type = other DNA

SEQ ID NO: 3616 - DNA, 66 bp, Synthetic construct; identical to SEQ ID NO: 1256
  source 1..66: mol_type = other DNA

SEQ ID NO: 3617 - DNA, 66 bp, Synthetic construct; identical to SEQ ID NO: 697
  source 1..66: mol_type = other DNA

SEQ ID NO: 3618 - DNA, 66 bp, Synthetic construct; identical to SEQ ID NO: 1041
  source 1..66: mol_type = other DNA

SEQ ID NO: 3619 - DNA, 66 bp, Synthetic construct; identical to SEQ ID NO: 264
  source 1..66: mol_type = other DNA

SEQ ID NO: 3620 - DNA, 66 bp, Synthetic construct; identical to SEQ ID NO: 1024
  source 1..66: mol_type = other DNA

SEQ ID NO: 3621 - DNA, 66 bp, Synthetic construct; identical to SEQ ID NO: 1206
  source 1..66: mol_type = other DNA

SEQ ID NO: 3622 - DNA, 66 bp, Synthetic construct; identical to SEQ ID NO: 343
  source 1..66: mol_type = other DNA

SEQ ID NO: 3623 - DNA, 66 bp, Synthetic construct; identical to SEQ ID NO: 982
  source 1..66: mol_type = other DNA

SEQ ID NO: 3624 - DNA, 66 bp, Synthetic construct; identical to SEQ ID NO: 1276
  source 1..66: mol_type = other DNA

SEQ ID NO: 3625 - DNA, 66 bp, Synthetic construct; identical to SEQ ID NO: 1307
  source 1..66: mol_type = other DNA

SEQ ID NO: 3626 - DNA, 66 bp, Synthetic construct; identical to SEQ ID NO: 836
  source 1..66: mol_type = other DNA

SEQ ID NO: 3627 - DNA, 66 bp, Synthetic construct; identical to SEQ ID NO: 1094
  source 1..66: mol_type = other DNA

SEQ ID NO: 3628 - DNA, 66 bp, Synthetic construct; identical to SEQ ID NO: 882
  source 1..66: mol_type = other DNA

SEQ ID NO: 3629 - DNA, 66 bp, Synthetic construct; identical to SEQ ID NO: 780
  source 1..66: mol_type = other DNA

SEQ ID NO: 3630 - DNA, 66 bp, Synthetic construct; identical to SEQ ID NO: 978
  source 1..66: mol_type = other DNA

SEQ ID NO: 3631 - DNA, 66 bp, Synthetic construct; identical to SEQ ID NO: 695
  source 1..66: mol_type = other DNA

SEQ ID NO: 3632 - DNA, 66 bp, Synthetic construct; identical to SEQ ID NO: 1580
  source 1..66: mol_type = other DNA

SEQ ID NO: 3633 - DNA, 66 bp, Synthetic construct; identical to SEQ ID NO: 1019
  source 1..66: mol_type = other DNA

SEQ ID NO: 3634 - DNA, 66 bp, Synthetic construct; identical to SEQ ID NO: 1129
  source 1..66: mol_type = other DNA

SEQ ID NO: 3635 - DNA, 66 bp, Synthetic construct; identical to SEQ ID NO: 902
  source 1..66: mol_type = other DNA

SEQ ID NO: 3636 - DNA, 66 bp, Synthetic construct; identical to SEQ ID NO: 953
  source 1..66: mol_type = other DNA

SEQ ID NO: 3637 - DNA, 66 bp, Synthetic construct; identical to SEQ ID NO: 589
  source 1..66: mol_type = other DNA

SEQ ID NO: 3638 - DNA, 66 bp, Synthetic construct; identical to SEQ ID NO: 1289
  source 1..66: mol_type = other DNA

SEQ ID NO: 3639 - DNA, 66 bp, Synthetic construct; identical to SEQ ID NO: 1003
  source 1..66: mol_type = other DNA

SEQ ID NO: 3640 - DNA, 66 bp, Synthetic construct; identical to SEQ ID NO: 1476
  source 1..66: mol_type = other DNA

SEQ ID NO: 3641 - DNA, 66 bp, Synthetic construct; identical to SEQ ID NO: 1416
  source 1..66: mol_type = other DNA

SEQ ID NO: 3642 - DNA, 66 bp, Synthetic construct; identical to SEQ ID NO: 1261
  source 1..66: mol_type = other DNA

SEQ ID NO: 3643 - DNA, 66 bp, Synthetic construct; identical to SEQ ID NO: 76
  source 1..66: mol_type = other DNA

SEQ ID NO: 3644 - DNA, 66 bp, Synthetic construct; identical to SEQ ID NO: 806
  source 1..66: mol_type = other DNA

SEQ ID NO: 3645 - DNA, 66 bp, Synthetic construct; identical to SEQ ID NO: 1207
  source 1..66: mol_type = other DNA

SEQ ID NO: 3646 - DNA, 66 bp, Synthetic construct; identical to SEQ ID NO: 1197
  source 1..66: mol_type = other DNA

SEQ ID NO: 3647 - DNA, 66 bp, Synthetic construct; identical to SEQ ID NO: 855
  source 1..66: mol_type = other DNA

SEQ ID NO: 3648 - DNA, 66 bp, Synthetic construct; identical to SEQ ID NO: 989
  source 1..66: mol_type = other DNA

SEQ ID NO: 3649 - DNA, 66 bp, Synthetic construct; identical to SEQ ID NO: 1100
  source 1..66: mol_type = other DNA

SEQ ID NO: 3650 - DNA, 66 bp, Synthetic construct; identical to SEQ ID NO: 1005
  source 1..66: mol_type = other DNA

SEQ ID NO: 3651 - DNA, 66 bp, Synthetic construct; identical to SEQ ID NO: 930
  source 1..66: mol_type = other DNA

SEQ ID NO: 3652 - DNA, 66 bp, Synthetic construct; identical to SEQ ID NO: 34
  source 1..66: mol_type = other DNA

SEQ ID NO: 3653 - DNA, 66 bp, Synthetic construct; identical to SEQ ID NO: 1172
  source 1..66: mol_type = other DNA

SEQ ID NO: 3654 - DNA, 66 bp, Synthetic construct; identical to SEQ ID NO: 5
  source 1..66: mol_type = other DNA

SEQ ID NO: 3655 - DNA, 66 bp, Synthetic construct; identical to SEQ ID NO: 1663
  source 1..66: mol_type = other DNA

SEQ ID NO: 3656 - DNA, 66 bp, Synthetic construct; identical to SEQ ID NO: 162
  source 1..66: mol_type = other DNA

SEQ ID NO: 3657 - DNA, 66 bp, Synthetic construct; identical to SEQ ID NO: 1185
  source 1..66: mol_type = other DNA

SEQ ID NO: 3658 - DNA, 66 bp, Synthetic construct; identical to SEQ ID NO: 967
  source 1..66: mol_type = other DNA

SEQ ID NO: 3659 - DNA, 66 bp, Synthetic construct; identical to SEQ ID NO: 1047
  source 1..66: mol_type = other DNA

SEQ ID NO: 3660 - DNA, 66 bp, Synthetic construct; identical to SEQ ID NO: 115
  source 1..66: mol_type = other DNA

SEQ ID NO: 3661 - DNA, 66 bp, Synthetic construct; identical to SEQ ID NO: 1201
  source 1..66: mol_type = other DNA

SEQ ID NO: 3662 - DNA, 66 bp, Synthetic construct; identical to SEQ ID NO: 1600
  source 1..66: mol_type = other DNA

SEQ ID NO: 3663 - DNA, 66 bp, Synthetic construct; identical to SEQ ID NO: 87
  source 1..66: mol_type = other DNA

SEQ ID NO: 3664 - DNA, 66 bp, Synthetic construct; identical to SEQ ID NO: 1225
  source 1..66: mol_type = other DNA

SEQ ID NO: 3665 - DNA, 66 bp, Synthetic construct; identical to SEQ ID NO: 853
  source 1..66: mol_type = other DNA

SEQ ID NO: 3666 - DNA, 66 bp, Synthetic construct; identical to SEQ ID NO: 1103
  source 1..66: mol_type = other DNA

SEQ ID NO: 3667 - DNA, 66 bp, Synthetic construct; identical to SEQ ID NO: 288
  source 1..66: mol_type = other DNA

SEQ ID NO: 3668 - DNA, 66 bp, Synthetic construct; identical to SEQ ID NO: 899
  source 1..66: mol_type = other DNA

SEQ ID NO: 3669 - DNA, 66 bp, Synthetic construct; identical to SEQ ID NO: 1121
  source 1..66: mol_type = other DNA

SEQ ID NO: 3670 - DNA, 66 bp, Synthetic construct; identical to SEQ ID NO: 734
  source 1..66: mol_type = other DNA

SEQ ID NO: 3671 - DNA, 66 bp, Synthetic construct; identical to SEQ ID NO: 995
  source 1..66: mol_type = other DNA

SEQ ID NO: 3672 - DNA, 66 bp, Synthetic construct; identical to SEQ ID NO: 417
  source 1..66: mol_type = other DNA

SEQ ID NO: 3673 - DNA, 66 bp, Synthetic construct; identical to SEQ ID NO: 962
  source 1..66: mol_type = other DNA

SEQ ID NO: 3674 - DNA, 66 bp, Synthetic construct; identical to SEQ ID NO: 1335
  source 1..66: mol_type = other DNA

SEQ ID NO: 3675 - DNA, 66 bp, Synthetic construct; identical to SEQ ID NO: 778
  source 1..66: mol_type = other DNA

SEQ ID NO: 3676 - DNA, 66 bp, Synthetic construct; identical to SEQ ID NO: 928
  source 1..66: mol_type = other DNA

SEQ ID NO: 3677 - DNA, 66 bp, Synthetic construct; identical to SEQ ID NO: 1045
  source 1..66: mol_type = other DNA

SEQ ID NO: 3678 - DNA, 66 bp, Synthetic construct; identical to SEQ ID NO: 963
  source 1..66: mol_type = other DNA

SEQ ID NO: 3679 - DNA, 66 bp, Synthetic construct; identical to SEQ ID NO: 110
  source 1..66: mol_type = other DNA

SEQ ID NO: 3680 - DNA, 66 bp, Synthetic construct; identical to SEQ ID NO: 631
  source 1..66: mol_type = other DNA

SEQ ID NO: 3681 - DNA, 66 bp, Synthetic construct; identical to SEQ ID NO: 949
  source 1..66: mol_type = other DNA

SEQ ID NO: 3682 - DNA, 66 bp, Synthetic construct; identical to SEQ ID NO: 947
  source 1..66: mol_type = other DNA

SEQ ID NO: 3683 - DNA, 66 bp, Synthetic construct; identical to SEQ ID NO: 875
  source 1..66: mol_type = other DNA

SEQ ID NO: 3684 - DNA, 66 bp, Synthetic construct; identical to SEQ ID NO: 10
  source 1..66: mol_type = other DNA

SEQ ID NO: 3685 - DNA, 66 bp, Synthetic construct; identical to SEQ ID NO: 1184
  source 1..66: mol_type = other DNA

SEQ ID NO: 3686 - DNA, 66 bp, Synthetic construct; identical to SEQ ID NO: 57
  source 1..66: mol_type = other DNA

SEQ ID NO: 3687 - DNA, 66 bp, Synthetic construct; identical to SEQ ID NO: 1359
  source 1..66: mol_type = other DNA

SEQ ID NO: 3688 - DNA, 66 bp, Synthetic construct; identical to SEQ ID NO: 999
  source 1..66: mol_type = other DNA

SEQ ID NO: 3689 - DNA, 66 bp, Synthetic construct; identical to SEQ ID NO: 363
  source 1..66: mol_type = other DNA

SEQ ID NO: 3690 - DNA, 66 bp, Synthetic construct; identical to SEQ ID NO: 1257
  source 1..66: mol_type = other DNA

SEQ ID NO: 3691 - DNA, 66 bp, Synthetic construct; identical to SEQ ID NO: 901
  source 1..66: mol_type = other DNA

SEQ ID NO: 3692 - DNA, 66 bp, Synthetic construct; identical to SEQ ID NO: 210
  source 1..66: mol_type = other DNA

SEQ ID NO: 3693 - DNA, 66 bp, Synthetic construct; identical to SEQ ID NO: 1530
  source 1..66: mol_type = other DNA

SEQ ID NO: 3694 - DNA, 66 bp, Synthetic construct; identical to SEQ ID NO: 1405
  source 1..66: mol_type = other DNA

SEQ ID NO: 3695 - DNA, 66 bp, Synthetic construct; identical to SEQ ID NO: 418
  source 1..66: mol_type = other DNA

SEQ ID NO: 3696 - DNA, 66 bp, Synthetic construct; identical to SEQ ID NO: 1314
  source 1..66: mol_type = other DNA

SEQ ID NO: 3697 - DNA, 66 bp, Synthetic construct; identical to SEQ ID NO: 1577
  source 1..66: mol_type = other DNA

SEQ ID NO: 3698 - DNA, 66 bp, Synthetic construct; identical to SEQ ID NO: 951
  source 1..66: mol_type = other DNA

SEQ ID NO: 3699 - DNA, 66 bp, Synthetic construct; identical to SEQ ID NO: 988
  source 1..66: mol_type = other DNA

SEQ ID NO: 3700 - DNA, 66 bp, Synthetic construct; identical to SEQ ID NO: 161
  source 1..66: mol_type = other DNA

SEQ ID NO: 3701 - DNA, 66 bp, Synthetic construct; identical to SEQ ID NO: 170
  source 1..66: mol_type = other DNA

SEQ ID NO: 3702 - DNA, 66 bp, Synthetic construct; identical to SEQ ID NO: 220
  source 1..66: mol_type = other DNA

SEQ ID NO: 3703 - DNA, 66 bp, Synthetic construct; identical to SEQ ID NO: 751
  source 1..66: mol_type = other DNA

SEQ ID NO: 3704 - DNA, 66 bp, Synthetic construct; identical to SEQ ID NO: 203
  source 1..66: mol_type = other DNA

SEQ ID NO: 3705 - DNA, 66 bp, Synthetic construct; identical to SEQ ID NO: 504
  source 1..66: mol_type = other DNA

SEQ ID NO: 3706 - DNA, 66 bp, Synthetic construct; identical to SEQ ID NO: 1142
  source 1..66: mol_type = other DNA

SEQ ID NO: 3707 - DNA, 66 bp, Synthetic construct; identical to SEQ ID NO: 1812
  source 1..66: mol_type = other DNA

SEQ ID NO: 3708 - DNA, 66 bp, Synthetic construct; identical to SEQ ID NO: 1218
  source 1..66: mol_type = other DNA

SEQ ID NO: 3709 - DNA, 66 bp, Synthetic construct; identical to SEQ ID NO: 1026
  source 1..66: mol_type = other DNA

SEQ ID NO: 3710 - DNA, 66 bp, Synthetic construct; identical to SEQ ID NO: 1059
  source 1..66: mol_type = other DNA

SEQ ID NO: 3711 - DNA, 66 bp, Synthetic construct; identical to SEQ ID NO: 1894
  source 1..66: mol_type = other DNA

SEQ ID NO: 3712 - DNA, 66 bp, Synthetic construct; identical to SEQ ID NO: 757
  source 1..66: mol_type = other DNA

SEQ ID NO: 3713 - DNA, 66 bp, Synthetic construct; identical to SEQ ID NO: 1156
  source 1..66: mol_type = other DNA

SEQ ID NO: 3714 - DNA, 66 bp, Synthetic construct; identical to SEQ ID NO: 270
  source 1..66: mol_type = other DNA

SEQ ID NO: 3715 - DNA, 66 bp, Synthetic construct; identical to SEQ ID NO: 1410
  source 1..66: mol_type = other DNA

SEQ ID NO: 3716 - DNA, 66 bp, Synthetic construct; identical to SEQ ID NO: 165
  source 1..66: mol_type = other DNA

SEQ ID NO: 3717 - DNA, 66 bp, Synthetic construct; identical to SEQ ID NO: 1016
  source 1..66: mol_type = other DNA

SEQ ID NO: 3718 - DNA, 66 bp, Synthetic construct; identical to SEQ ID NO: 826
  source 1..66: mol_type = other DNA

SEQ ID NO: 3719 - DNA, 66 bp, Synthetic construct; identical to SEQ ID NO: 1247
  source 1..66: mol_type = other DNA

SEQ ID NO: 3720 - DNA, 66 bp, Synthetic construct; identical to SEQ ID NO: 877
  source 1..66: mol_type = other DNA

SEQ ID NO: 3721 - DNA, 66 bp, Synthetic construct; identical to SEQ ID NO: 766
  source 1..66: mol_type = other DNA

SEQ ID NO: 3722 - DNA, 66 bp, Synthetic construct; identical to SEQ ID NO: 1284
  source 1..66: mol_type = other DNA

SEQ ID NO: 3723 - DNA, 66 bp, Synthetic construct; identical to SEQ ID NO: 391
  source 1..66: mol_type = other DNA

SEQ ID NO: 3724 - DNA, 66 bp, Synthetic construct; identical to SEQ ID NO: 495
  source 1..66: mol_type = other DNA

SEQ ID NO: 3725 - DNA, 66 bp, Synthetic construct; identical to SEQ ID NO: 215
  source 1..66: mol_type = other DNA

SEQ ID NO: 3726 - DNA, 66 bp, Synthetic construct; identical to SEQ ID NO: 29
  source 1..66: mol_type = other DNA

SEQ ID NO: 3727 - DNA, 66 bp, Synthetic construct; identical to SEQ ID NO: 759
  source 1..66: mol_type = other DNA

SEQ ID NO: 3728 - DNA, 66 bp, Synthetic construct; identical to SEQ ID NO: 843
  source 1..66: mol_type = other DNA

SEQ ID NO: 3729 - DNA, 66 bp, Synthetic construct; identical to SEQ ID NO: 1859
  source 1..66: mol_type = other DNA

SEQ ID NO: 3730 - DNA, 66 bp, Synthetic construct; identical to SEQ ID NO: 30
  source 1..66: mol_type = other DNA

SEQ ID NO: 3731 - DNA, 66 bp, Synthetic construct; identical to SEQ ID NO: 1040
  source 1..66: mol_type = other DNA

SEQ ID NO: 3732 - DNA, 66 bp, Synthetic construct; identical to SEQ ID NO: 2029
  source 1..66: mol_type = other DNA

SEQ ID NO: 3733 - DNA, 66 bp, Synthetic construct; identical to SEQ ID NO: 1262
  source 1..66: mol_type = other DNA

SEQ ID NO: 3734 - DNA, 66 bp, Synthetic construct; identical to SEQ ID NO: 891
  source 1..66: mol_type = other DNA

SEQ ID NO: 3735 - DNA, 66 bp, Synthetic construct; identical to SEQ ID NO: 964
  source 1..66: mol_type = other DNA

SEQ ID NO: 3736 - DNA, 66 bp, Synthetic construct; identical to SEQ ID NO: 1252
  source 1..66: mol_type = other DNA

SEQ ID NO: 3737 - DNA, 66 bp, Synthetic construct; identical to SEQ ID NO: 70
  source 1..66: mol_type = other DNA

SEQ ID NO: 3738 - DNA, 66 bp, Synthetic construct; identical to SEQ ID NO: 1627
  source 1..66: mol_type = other DNA

SEQ ID NO: 3739 - DNA, 66 bp, Synthetic construct; identical to SEQ ID NO: 189
  source 1..66: mol_type = other DNA

SEQ ID NO: 3740 - DNA, 66 bp, Synthetic construct; identical to SEQ ID NO: 333
  source 1..66: mol_type = other DNA

SEQ ID NO: 3741 - DNA, 66 bp, Synthetic construct; identical to SEQ ID NO: 1394
  source 1..66: mol_type = other DNA

SEQ ID NO: 3742 - DNA, 66 bp, Synthetic construct; identical to SEQ ID NO: 1091
  source 1..66: mol_type = other DNA

SEQ ID NO: 3743 - DNA, 66 bp, Synthetic construct; identical to SEQ ID NO: 993
  source 1..66: mol_type = other DNA

SEQ ID NO: 3744 - DNA, 66 bp, Synthetic construct; identical to SEQ ID NO: 112
  source 1..66: mol_type = other DNA

SEQ ID NO: 3745 - DNA, 66 bp, Synthetic construct; identical to SEQ ID NO: 1810
  source 1..66: mol_type = other DNA

SEQ ID NO: 3746 - DNA, 66 bp, Synthetic construct; identical to SEQ ID NO: 68
  source 1..66: mol_type = other DNA

SEQ ID NO: 3747 - DNA, 66 bp, Synthetic construct; identical to SEQ ID NO: 1159
  source 1..66: mol_type = other DNA

SEQ ID NO: 3748 - DNA, 66 bp, Synthetic construct; identical to SEQ ID NO: 218
  source 1..66: mol_type = other DNA

SEQ ID NO: 3749 - DNA, 66 bp, Synthetic construct; identical to SEQ ID NO: 1301
  source 1..66: mol_type = other DNA

SEQ ID NO: 3750 - DNA, 66 bp, Synthetic construct; identical to SEQ ID NO: 147
  source 1..66: mol_type = other DNA

SEQ ID NO: 3751 - DNA, 66 bp, Synthetic construct; identical to SEQ ID NO: 1334
  source 1..66: mol_type = other DNA

SEQ ID NO: 3752 - DNA, 66 bp, Synthetic construct; identical to SEQ ID NO: 966
  source 1..66: mol_type = other DNA

SEQ ID NO: 3753 - DNA, 66 bp, Synthetic construct; identical to SEQ ID NO: 2158
  source 1..66: mol_type = other DNA

SEQ ID NO: 3754 - DNA, 66 bp, Synthetic construct; identical to SEQ ID NO: 1395
  source 1..66: mol_type = other DNA

SEQ ID NO: 3755 - DNA, 66 bp, Synthetic construct; identical to SEQ ID NO: 1049
  source 1..66: mol_type = other DNA

SEQ ID NO: 3756 - DNA, 66 bp, Synthetic construct; identical to SEQ ID NO: 1014
  source 1..66: mol_type = other DNA

SEQ ID NO: 3757 - DNA, 66 bp, Synthetic construct; identical to SEQ ID NO: 1058
  source 1..66: mol_type = other DNA

SEQ ID NO: 3758 - DNA, 66 bp, Synthetic construct; identical to SEQ ID NO: 118
  source 1..66: mol_type = other DNA

SEQ ID NO: 3759 - DNA, 66 bp, Synthetic construct; identical to SEQ ID NO: 229
  source 1..66: mol_type = other DNA

SEQ ID NO: 3760 - DNA, 66 bp, Synthetic construct; identical to SEQ ID NO: 1043
  source 1..66: mol_type = other DNA

SEQ ID NO: 3761 - DNA, 66 bp, Synthetic construct; identical to SEQ ID NO: 17
  source 1..66: mol_type = other DNA

SEQ ID NO: 3762 - DNA, 66 bp, Synthetic construct; identical to SEQ ID NO: 1666
  source 1..66: mol_type = other DNA

SEQ ID NO: 3763 - DNA, 66 bp, Synthetic construct; identical to SEQ ID NO: 27
  source 1..66: mol_type = other DNA

SEQ ID NO: 3764 - DNA, 66 bp, Synthetic construct; identical to SEQ ID NO: 486
  source 1..66: mol_type = other DNA

SEQ ID NO: 3765 - DNA, 66 bp, Synthetic construct; identical to SEQ ID NO: 21
  source 1..66: mol_type = other DNA

SEQ ID NO: 3766 - DNA, 66 bp, Synthetic construct; identical to SEQ ID NO: 2296
  source 1..66: mol_type = other DNA

SEQ ID NO: 3767 - DNA, 66 bp, Synthetic construct; identical to SEQ ID NO: 243
  source 1..66: mol_type = other DNA

SEQ ID NO: 3768 - DNA, 66 bp, Synthetic construct; identical to SEQ ID NO: 2445
  source 1..66: mol_type = other DNA

SEQ ID NO: 3769 - DNA, 66 bp, Synthetic construct; identical to SEQ ID NO: 79
  source 1..66: mol_type = other DNA

SEQ ID NO: 3770 - DNA, 66 bp, Synthetic construct; identical to SEQ ID NO: 163
  source 1..66: mol_type = other DNA

SEQ ID NO: 3771 - DNA, 66 bp, Synthetic construct; identical to SEQ ID NO: 151
  source 1..66: mol_type = other DNA

SEQ ID NO: 3772 - DNA, 66 bp, Synthetic construct; identical to SEQ ID NO: 1418
  source 1..66: mol_type = other DNA

SEQ ID NO: 3773 - DNA, 66 bp, Synthetic construct; identical to SEQ ID NO: 24
  source 1..66: mol_type = other DNA

SEQ ID NO: 3774 - DNA, 66 bp, Synthetic construct; identical to SEQ ID NO: 13
  source 1..66: mol_type = other DNA

SEQ ID NO: 3775 - DNA, 66 bp, Synthetic construct; identical to SEQ ID NO: 1333
  source 1..66: mol_type = other DNA

SEQ ID NO: 3776 - DNA, 66 bp, Synthetic construct; identical to SEQ ID NO: 1478
  source 1..66: mol_type = other DNA

SEQ ID NO: 3777 - DNA, 66 bp, Synthetic construct; identical to SEQ ID NO: 1369
  source 1..66: mol_type = other DNA

SEQ ID NO: 3778 - DNA, 66 bp, Synthetic construct; identical to SEQ ID NO: 510
  source 1..66: mol_type = other DNA

SEQ ID NO: 3779 - DNA, 66 bp, Synthetic construct; identical to SEQ ID NO: 1167
  source 1..66: mol_type = other DNA

SEQ ID NO: 3780 - DNA, 66 bp, Synthetic construct; identical to SEQ ID NO: 320
  source 1..66: mol_type = other DNA

SEQ ID NO: 3781 - DNA, 66 bp, Synthetic construct; identical to SEQ ID NO: 732
  source 1..66: mol_type = other DNA

SEQ ID NO: 3782 - DNA, 66 bp, Synthetic construct; identical to SEQ ID NO: 1303
  source 1..66: mol_type = other DNA

SEQ ID NO: 3783 - DNA, 66 bp, Synthetic construct; identical to SEQ ID NO: 136
  source 1..66: mol_type = other DNA

SEQ ID NO: 3784 - DNA, 66 bp, Synthetic construct; identical to SEQ ID NO: 1590
  source 1..66: mol_type = other DNA

SEQ ID NO: 3785 - DNA, 66 bp, Synthetic construct; identical to SEQ ID NO: 762
  source 1..66: mol_type = other DNA

SEQ ID NO: 3786 - DNA, 66 bp, Synthetic construct; identical to SEQ ID NO: 399
  source 1..66: mol_type = other DNA

SEQ ID NO: 3787 - DNA, 66 bp, Synthetic construct; identical to SEQ ID NO: 765
  source 1..66: mol_type = other DNA

SEQ ID NO: 3788 - DNA, 66 bp, Synthetic construct; identical to SEQ ID NO: 322
  source 1..66: mol_type = other DNA

SEQ ID NO: 3789 - DNA, 66 bp, Synthetic construct; identical to SEQ ID NO: 1064
  source 1..66: mol_type = other DNA

SEQ ID NO: 3790 - DNA, 66 bp, Synthetic construct; identical to SEQ ID NO: 228
  source 1..66: mol_type = other DNA

SEQ ID NO: 3791 - DNA, 66 bp, Synthetic construct; identical to SEQ ID NO: 355
  source 1..66: mol_type = other DNA

SEQ ID NO: 3792 - DNA, 66 bp, Synthetic construct; identical to SEQ ID NO: 1251
  source 1..66: mol_type = other DNA

SEQ ID NO: 3793 - DNA, 66 bp, Synthetic construct; identical to SEQ ID NO: 143
  source 1..66: mol_type = other DNA

SEQ ID NO: 3794 - DNA, 66 bp, Synthetic construct; identical to SEQ ID NO: 149
  source 1..66: mol_type = other DNA

SEQ ID NO: 3795 - DNA, 66 bp, Synthetic construct; identical to SEQ ID NO: 281
  source 1..66: mol_type = other DNA

SEQ ID NO: 3796 - DNA, 66 bp, Synthetic construct; identical to SEQ ID NO: 1069
  source 1..66: mol_type = other DNA

SEQ ID NO: 3797 - DNA, 66 bp, Synthetic construct; identical to SEQ ID NO: 1482
  source 1..66: mol_type = other DNA

SEQ ID NO: 3798 - DNA, 66 bp, Synthetic construct; identical to SEQ ID NO: 202
  source 1..66: mol_type = other DNA

SEQ ID NO: 3799 - DNA, 66 bp, Synthetic construct; identical to SEQ ID NO: 1789
  source 1..66: mol_type = other DNA

SEQ ID NO: 3800 - DNA, 66 bp, Synthetic construct; identical to SEQ ID NO: 160
  source 1..66: mol_type = other DNA

SEQ ID NO: 3801 - DNA, 66 bp, Synthetic construct; identical to SEQ ID NO: 830
  source 1..66: mol_type = other DNA

SEQ ID NO: 3802 - DNA, 66 bp, Synthetic construct; identical to SEQ ID NO: 1029
  source 1..66: mol_type = other DNA

SEQ ID NO: 3803 - DNA, 66 bp, Synthetic construct; identical to SEQ ID NO: 90
  source 1..66: mol_type = other DNA

SEQ ID NO: 3804 - DNA, 66 bp, Synthetic construct; identical to SEQ ID NO: 211
  source 1..66: mol_type = other DNA

SEQ ID NO: 3805 - DNA, 66 bp, Synthetic construct; identical to SEQ ID NO: 1548
  source 1..66: mol_type = other DNA

SEQ ID NO: 3806 - DNA, 66 bp, Synthetic construct; identical to SEQ ID NO: 1087
  source 1..66: mol_type = other DNA

SEQ ID NO: 3807 - DNA, 66 bp, Synthetic construct; identical to SEQ ID NO: 1435
  source 1..66: mol_type = other DNA

SEQ ID NO: 3808 - DNA, 66 bp, Synthetic construct; identical to SEQ ID NO: 828
  source 1..66: mol_type = other DNA

SEQ ID NO: 3809 - DNA, 66 bp, Synthetic construct; identical to SEQ ID NO: 1162
  source 1..66: mol_type = other DNA

SEQ ID NO: 3810 - DNA, 66 bp, Synthetic construct; identical to SEQ ID NO: 1644
  source 1..66: mol_type = other DNA

SEQ ID NO: 3811 - DNA, 66 bp, Synthetic construct; identical to SEQ ID NO: 1030
  source 1..66: mol_type = other DNA

SEQ ID NO: 3812 - DNA, 66 bp, Synthetic construct; identical to SEQ ID NO: 1520
  source 1..66: mol_type = other DNA

SEQ ID NO: 3813 - DNA, 66 bp, Synthetic construct; identical to SEQ ID NO: 1212
  source 1..66: mol_type = other DNA

SEQ ID NO: 3814 - DNA, 66 bp, Synthetic construct; identical to SEQ ID NO: 723
  source 1..66: mol_type = other DNA

SEQ ID NO: 3815 - DNA, 66 bp, Synthetic construct; identical to SEQ ID NO: 97
  source 1..66: mol_type = other DNA

SEQ ID NO: 3816 - DNA, 66 bp, Synthetic construct; identical to SEQ ID NO: 1316
  source 1..66: mol_type = other DNA

SEQ ID NO: 3817 - DNA, 66 bp, Synthetic construct; identical to SEQ ID NO: 164
  source 1..66: mol_type = other DNA

SEQ ID NO: 3818 - DNA, 66 bp, Synthetic construct; identical to SEQ ID NO: 1294
  source 1..66: mol_type = other DNA

SEQ ID NO: 3819 - DNA, 66 bp, Synthetic construct; identical to SEQ ID NO: 1265
  source 1..66: mol_type = other DNA

SEQ ID NO: 3820 - DNA, 66 bp, Synthetic construct; identical to SEQ ID NO: 1976
  source 1..66: mol_type = other DNA

SEQ ID NO: 3821 - DNA, 66 bp, Synthetic construct; identical to SEQ ID NO: 389
  source 1..66: mol_type = other DNA

SEQ ID NO: 3822 - DNA, 66 bp, Synthetic construct; identical to SEQ ID NO: 1390
  source 1..66: mol_type = other DNA

SEQ ID NO: 3823 - DNA, 66 bp, Synthetic construct; identical to SEQ ID NO: 550
  source 1..66: mol_type = other DNA

SEQ ID NO: 3824 - DNA, 66 bp, Synthetic construct; identical to SEQ ID NO: 987
  source 1..66: mol_type = other DNA

SEQ ID NO: 3825 - DNA, 66 bp, Synthetic construct; identical to SEQ ID NO: 187
  source 1..66: mol_type = other DNA

SEQ ID NO: 3826 - DNA, 66 bp, Synthetic construct; identical to SEQ ID NO: 338
  source 1..66: mol_type = other DNA

SEQ ID NO: 3827 - DNA, 66 bp, Synthetic construct; identical to SEQ ID NO: 929
  source 1..66: mol_type = other DNA

SEQ ID NO: 3828 - DNA, 66 bp, Synthetic construct; identical to SEQ ID NO: 60
  source 1..66: mol_type = other DNA

SEQ ID NO: 3829 - DNA, 66 bp, Synthetic construct; identical to SEQ ID NO: 545
  source 1..66: mol_type = other DNA

SEQ ID NO: 3830 - DNA, 66 bp, Synthetic construct; identical to SEQ ID NO: 2073
  source 1..66: mol_type = other DNA

SEQ ID NO: 3831 - DNA, 66 bp, Synthetic construct; identical to SEQ ID NO: 2155
  source 1..66: mol_type = other DNA

SEQ ID NO: 3832 - DNA, 66 bp, Synthetic construct; identical to SEQ ID NO: 226
  source 1..66: mol_type = other DNA

SEQ ID NO: 3833 - DNA, 66 bp, Synthetic construct; identical to SEQ ID NO: 84
  source 1..66: mol_type = other DNA

SEQ ID NO: 3834 - DNA, 66 bp, Synthetic construct; identical to SEQ ID NO: 934
  source 1..66: mol_type = other DNA

SEQ ID NO: 3835 - DNA, 66 bp, Synthetic construct; identical to SEQ ID NO: 197
  source 1..66: mol_type = other DNA

SEQ ID NO: 3836 - DNA, 66 bp, Synthetic construct; identical to SEQ ID NO: 506
  source 1..66: mol_type = other DNA

SEQ ID NO: 3837 - DNA, 66 bp, Synthetic construct; identical to SEQ ID NO: 655
  source 1..66: mol_type = other DNA

SEQ ID NO: 3838 - DNA, 66 bp, Synthetic construct; identical to SEQ ID NO: 1511
  source 1..66: mol_type = other DNA

SEQ ID NO: 3839 - DNA, 66 bp, Synthetic construct; identical to SEQ ID NO: 1670
  source 1..66: mol_type = other DNA

SEQ ID NO: 3840 - DNA, 66 bp, Synthetic construct; identical to SEQ ID NO: 1427
  source 1..66: mol_type = other DNA

SEQ ID NO: 3841 - DNA, 66 bp, Synthetic construct; identical to SEQ ID NO: 1926
  source 1..66: mol_type = other DNA

SEQ ID NO: 3842 - DNA, 66 bp, Synthetic construct; identical to SEQ ID NO: 799
  source 1..66: mol_type = other DNA

SEQ ID NO: 3843 - DNA, 66 bp, Synthetic construct; identical to SEQ ID NO: 1274
  source 1..66: mol_type = other DNA

SEQ ID NO: 3844 - DNA, 66 bp, Synthetic construct; identical to SEQ ID NO: 1474
  source 1..66: mol_type = other DNA

SEQ ID NO: 3845 - DNA, 66 bp, Synthetic construct; identical to SEQ ID NO: 508
  source 1..66: mol_type = other DNA

SEQ ID NO: 3846 - DNA, 66 bp, Synthetic construct; identical to SEQ ID NO: 698
  source 1..66: mol_type = other DNA

SEQ ID NO: 3847 - DNA, 66 bp, Synthetic construct; identical to SEQ ID NO: 932
  source 1..66: mol_type = other DNA

SEQ ID NO: 3848 - DNA, 66 bp, Synthetic construct; identical to SEQ ID NO: 1255
  source 1..66: mol_type = other DNA

SEQ ID NO: 3849 - DNA, 66 bp, Synthetic construct; identical to SEQ ID NO: 1419
  source 1..66: mol_type = other DNA

SEQ ID NO: 3850 - DNA, 66 bp, Synthetic construct; identical to SEQ ID NO: 1623
  source 1..66: mol_type = other DNA

SEQ ID NO: 3851 - DNA, 66 bp, Synthetic construct; identical to SEQ ID NO: 1127
  source 1..66: mol_type = other DNA

SEQ ID NO: 3852 - DNA, 66 bp, Synthetic construct; identical to SEQ ID NO: 1032
  source 1..66: mol_type = other DNA

SEQ ID NO: 3853 - DNA, 66 bp, Synthetic construct; identical to SEQ ID NO: 1090
  source 1..66: mol_type = other DNA

SEQ ID NO: 3854 - DNA, 66 bp, Synthetic construct; identical to SEQ ID NO: 1028
  source 1..66: mol_type = other DNA

SEQ ID NO: 3855 - DNA, 66 bp, Synthetic construct; identical to SEQ ID NO: 410
  source 1..66: mol_type = other DNA

SEQ ID NO: 3856 - DNA, 66 bp, Synthetic construct; identical to SEQ ID NO: 1514
  source 1..66: mol_type = other DNA

SEQ ID NO: 3857 - DNA, 66 bp, Synthetic construct; identical to SEQ ID NO: 1217
  source 1..66: mol_type = other DNA

SEQ ID NO: 3858 - DNA, 66 bp, Synthetic construct; identical to SEQ ID NO: 63
  source 1..66: mol_type = other DNA

SEQ ID NO: 3859 - DNA, 66 bp, Synthetic construct; identical to SEQ ID NO: 1243
  source 1..66: mol_type = other DNA

SEQ ID NO: 3860 - DNA, 66 bp, Synthetic construct; identical to SEQ ID NO: 1374
  source 1..66: mol_type = other DNA

SEQ ID NO: 3861 - DNA, 66 bp, Synthetic construct; identical to SEQ ID NO: 453
  source 1..66: mol_type = other DNA

SEQ ID NO: 3862 - DNA, 66 bp, Synthetic construct; identical to SEQ ID NO: 1066
  source 1..66: mol_type = other DNA

SEQ ID NO: 3863 - DNA, 66 bp, Synthetic construct; identical to SEQ ID NO: 1491
  source 1..66: mol_type = other DNA

SEQ ID NO: 3864 - DNA, 66 bp, Synthetic construct; identical to SEQ ID NO: 888
  source 1..66: mol_type = other DNA

SEQ ID NO: 3865 - DNA, 66 bp, Synthetic construct; identical to SEQ ID NO: 1202
  source 1..66: mol_type = other DNA

SEQ ID NO: 3866 - DNA, 66 bp, Synthetic construct; identical to SEQ ID NO: 470
  source 1..66: mol_type = other DNA

SEQ ID NO: 3867 - DNA, 66 bp, Synthetic construct; identical to SEQ ID NO: 67
  source 1..66: mol_type = other DNA

SEQ ID NO: 3868 - DNA, 66 bp, Synthetic construct; identical to SEQ ID NO: 679
  source 1..66: mol_type = other DNA

SEQ ID NO: 3869 - DNA, 66 bp, Synthetic construct; identical to SEQ ID NO: 775
  source 1..66: mol_type = other DNA

SEQ ID NO: 3870 - DNA, 66 bp, Synthetic construct; identical to SEQ ID NO: 180
  source 1..66: mol_type = other DNA

SEQ ID NO: 3871 - DNA, 66 bp, Synthetic construct; identical to SEQ ID NO: 253
  source 1..66: mol_type = other DNA

SEQ ID NO: 3872 - DNA, 66 bp, Synthetic construct; identical to SEQ ID NO: 2123
  source 1..66: mol_type = other DNA

SEQ ID NO: 3873 - DNA, 66 bp, Synthetic construct; identical to SEQ ID NO: 9
  source 1..66: mol_type = other DNA

SEQ ID NO: 3874 - DNA, 66 bp, Synthetic construct; identical to SEQ ID NO: 182
  source 1..66: mol_type = other DNA

SEQ ID NO: 3875 - DNA, 66 bp, Synthetic construct; identical to SEQ ID NO: 1804
  source 1..66: mol_type = other DNA

SEQ ID NO: 3876 - DNA, 66 bp, Synthetic construct; identical to SEQ ID NO: 206
  source 1..66: mol_type = other DNA

SEQ ID NO: 3877 - DNA, 66 bp, Synthetic construct; identical to SEQ ID NO: 1299
  source 1..66: mol_type = other DNA

SEQ ID NO: 3878 - DNA, 66 bp, Synthetic construct; identical to SEQ ID NO: 1022
  source 1..66: mol_type = other DNA

SEQ ID NO: 3879 - DNA, 66 bp, Synthetic construct; identical to SEQ ID NO: 1126
  source 1..66: mol_type = other DNA

SEQ ID NO: 3880 - DNA, 66 bp, Synthetic construct; identical to SEQ ID NO: 11
  source 1..66: mol_type = other DNA

SEQ ID NO: 3881 - DNA, 66 bp, Synthetic construct; identical to SEQ ID NO: 262
  source 1..66: mol_type = other DNA

SEQ ID NO: 3882 - DNA, 66 bp, Synthetic construct; identical to SEQ ID NO: 831
  source 1..66: mol_type = other DNA

SEQ ID NO: 3883 - DNA, 66 bp, Synthetic construct; identical to SEQ ID NO: 4
  source 1..66: mol_type = other DNA

SEQ ID NO: 3884 - DNA, 66 bp, Synthetic construct; identical to SEQ ID NO: 824
  source 1..66: mol_type = other DNA

SEQ ID NO: 3885 - DNA, 66 bp, Synthetic construct; identical to SEQ ID NO: 1123
  source 1..66: mol_type = other DNA

SEQ ID NO: 3886 - DNA, 66 bp, Synthetic construct; identical to SEQ ID NO: 849
  source 1..66: mol_type = other DNA

SEQ ID NO: 3887 - DNA, 66 bp, Synthetic construct; identical to SEQ ID NO: 1869
  source 1..66: mol_type = other DNA

SEQ ID NO: 3888 - DNA, 66 bp, Synthetic construct; identical to SEQ ID NO: 423
  source 1..66: mol_type = other DNA

SEQ ID NO: 3889 - DNA, 66 bp, Synthetic construct; identical to SEQ ID NO: 1178
  source 1..66: mol_type = other DNA

SEQ ID NO: 3890 - DNA, 66 bp, Synthetic construct; identical to SEQ ID NO: 1459
  source 1..66: mol_type = other DNA

SEQ ID NO: 3891 - DNA, 66 bp, Synthetic construct; identical to SEQ ID NO: 1144
  source 1..66: mol_type = other DNA

SEQ ID NO: 3892 - DNA, 66 bp, Synthetic construct; identical to SEQ ID NO: 1050
  source 1..66: mol_type = other DNA

SEQ ID NO: 3893 - DNA, 66 bp, Synthetic construct; identical to SEQ ID NO: 176
  source 1..66: mol_type = other DNA

SEQ ID NO: 3894 - DNA, 66 bp, Synthetic construct; identical to SEQ ID NO: 340
  source 1..66: mol_type = other DNA

SEQ ID NO: 3895 - DNA, 66 bp, Synthetic construct; identical to SEQ ID NO: 1391
  source 1..66: mol_type = other DNA

SEQ ID NO: 3896 - DNA, 66 bp, Synthetic construct; identical to SEQ ID NO: 1721
  source 1..66: mol_type = other DNA

SEQ ID NO: 3897 - DNA, 66 bp, Synthetic construct; identical to SEQ ID NO: 249
  source 1..66: mol_type = other DNA

SEQ ID NO: 3898 - DNA, 66 bp, Synthetic construct; identical to SEQ ID NO: 1070
  source 1..66: mol_type = other DNA

SEQ ID NO: 3899 - DNA, 66 bp, Synthetic construct; identical to SEQ ID NO: 552
  source 1..66: mol_type = other DNA

SEQ ID NO: 3900 - DNA, 66 bp, Synthetic construct; identical to SEQ ID NO: 213
  source 1..66: mol_type = other DNA

SEQ ID NO: 3901 - DNA, 66 bp, Synthetic construct; identical to SEQ ID NO: 1213
  source 1..66: mol_type = other DNA

SEQ ID NO: 3902 - DNA, 66 bp, Synthetic construct; identical to SEQ ID NO: 1872
  source 1..66: mol_type = other DNA

SEQ ID NO: 3903 - DNA, 66 bp, Synthetic construct; identical to SEQ ID NO: 881
  source 1..66: mol_type = other DNA

SEQ ID NO: 3904 - DNA, 66 bp, Synthetic construct; identical to SEQ ID NO: 2191
  source 1..66: mol_type = other DNA

SEQ ID NO: 3905 - DNA, 66 bp, Synthetic construct; identical to SEQ ID NO: 627
  source 1..66: mol_type = other DNA

SEQ ID NO: 3906 - DNA, 66 bp, Synthetic construct; identical to SEQ ID NO: 1122
  source 1..66: mol_type = other DNA

SEQ ID NO: 3907 - DNA, 66 bp, Synthetic construct; identical to SEQ ID NO: 1161
  source 1..66: mol_type = other DNA

SEQ ID NO: 3908 - DNA, 66 bp, Synthetic construct; identical to SEQ ID NO: 1370
  source 1..66: mol_type = other DNA

SEQ ID NO: 3909 - DNA, 66 bp, Synthetic construct; identical to SEQ ID NO: 425
  source 1..66: mol_type = other DNA

SEQ ID NO: 3910 - DNA, 66 bp, Synthetic construct; identical to SEQ ID NO: 329
  source 1..66: mol_type = other DNA

SEQ ID NO: 3911 - DNA, 66 bp, Synthetic construct; identical to SEQ ID NO: 1387
  source 1..66: mol_type = other DNA

SEQ ID NO: 3912 - DNA, 66 bp, Synthetic construct; identical to SEQ ID NO: 546
  source 1..66: mol_type = other DNA

SEQ ID NO: 3913 - DNA, 66 bp, Synthetic construct; identical to SEQ ID NO: 1329
  source 1..66: mol_type = other DNA

SEQ ID NO: 3914 - DNA, 66 bp, Synthetic construct; identical to SEQ ID NO: 1430
  source 1..66: mol_type = other DNA

SEQ ID NO: 3915 - DNA, 66 bp, Synthetic construct; identical to SEQ ID NO: 1737
  source 1..66: mol_type = other DNA

SEQ ID NO: 3916 - DNA, 66 bp, Synthetic construct; identical to SEQ ID NO: 174
  source 1..66: mol_type = other DNA

SEQ ID NO: 3917 - DNA, 66 bp, Synthetic construct; identical to SEQ ID NO: 764
  source 1..66: mol_type = other DNA

SEQ ID NO: 3918 - DNA, 66 bp, Synthetic construct; identical to SEQ ID NO: 374
  source 1..66: mol_type = other DNA

SEQ ID NO: 3919 - DNA, 66 bp, Synthetic construct; identical to SEQ ID NO: 1268
  source 1..66: mol_type = other DNA

SEQ ID NO: 3920 - DNA, 66 bp, Synthetic construct; identical to SEQ ID NO: 1762
  source 1..66: mol_type = other DNA

SEQ ID NO: 3921 - DNA, 66 bp, Synthetic construct; identical to SEQ ID NO: 864
  source 1..66: mol_type = other DNA

SEQ ID NO: 3922 - DNA, 66 bp, Synthetic construct; identical to SEQ ID NO: 1908
  source 1..66: mol_type = other DNA

SEQ ID NO: 3923 - DNA, 66 bp, Synthetic construct; identical to SEQ ID NO: 817
  source 1..66: mol_type = other DNA

SEQ ID NO: 3924 - DNA, 66 bp, Synthetic construct; identical to SEQ ID NO: 860
  source 1..66: mol_type = other DNA

SEQ ID NO: 3925 - DNA, 66 bp, Synthetic construct; identical to SEQ ID NO: 16
  source 1..66: mol_type = other DNA

SEQ ID NO: 3926 - DNA, 66 bp, Synthetic construct; identical to SEQ ID NO: 1505
  source 1..66: mol_type = other DNA

SEQ ID NO: 3927 - DNA, 66 bp, Synthetic construct; identical to SEQ ID NO: 379
  source 1..66: mol_type = other DNA

SEQ ID NO: 3928 - DNA, 66 bp, Synthetic construct; identical to SEQ ID NO: 284
  source 1..66: mol_type = other DNA

SEQ ID NO: 3929 - DNA, 66 bp, Synthetic construct; identical to SEQ ID NO: 890
  source 1..66: mol_type = other DNA

SEQ ID NO: 3930 - DNA, 66 bp, Synthetic construct; identical to SEQ ID NO: 1038
  source 1..66: mol_type = other DNA

SEQ ID NO: 3931 - DNA, 66 bp, Synthetic construct; identical to SEQ ID NO: 37
  source 1..66: mol_type = other DNA

SEQ ID NO: 3932 - DNA, 66 bp, Synthetic construct; identical to SEQ ID NO: 139
  source 1..66: mol_type = other DNA

SEQ ID NO: 3933 - DNA, 66 bp, Synthetic construct; identical to SEQ ID NO: 1323
  source 1..66: mol_type = other DNA

SEQ ID NO: 3934 - DNA, 66 bp, Synthetic construct; identical to SEQ ID NO: 1189
  source 1..66: mol_type = other DNA

SEQ ID NO: 3935 - DNA, 66 bp, Synthetic construct; identical to SEQ ID NO: 1428
  source 1..66: mol_type = other DNA

SEQ ID NO: 3936 - DNA, 66 bp, Synthetic construct; identical to SEQ ID NO: 383
  source 1..66: mol_type = other DNA

SEQ ID NO: 3937 - DNA, 66 bp, Synthetic construct; identical to SEQ ID NO: 200
  source 1..66: mol_type = other DNA

SEQ ID NO: 3938 - DNA, 66 bp, Synthetic construct; identical to SEQ ID NO: 1141
  source 1..66: mol_type = other DNA

SEQ ID NO: 3939 - DNA, 66 bp, Synthetic construct; identical to SEQ ID NO: 748
  source 1..66: mol_type = other DNA

SEQ ID NO: 3940 - DNA, 66 bp, Synthetic construct; identical to SEQ ID NO: 1969
  source 1..66: mol_type = other DNA

SEQ ID NO: 3941 - DNA, 66 bp, Synthetic construct; identical to SEQ ID NO: 244
  source 1..66: mol_type = other DNA

SEQ ID NO: 3942 - DNA, 66 bp, Synthetic construct; identical to SEQ ID NO: 1361
  source 1..66: mol_type = other DNA

SEQ ID NO: 3943 - DNA, 66 bp, Synthetic construct; identical to SEQ ID NO: 1224
  source 1..66: mol_type = other DNA

SEQ ID NO: 3944 - DNA, 66 bp, Synthetic construct; identical to SEQ ID NO: 83
  source 1..66: mol_type = other DNA

SEQ ID NO: 3945 - DNA, 66 bp, Synthetic construct; identical to SEQ ID NO: 1781
  source 1..66: mol_type = other DNA

SEQ ID NO: 3946 - DNA, 66 bp, Synthetic construct; identical to SEQ ID NO: 1453
  source 1..66: mol_type = other DNA

SEQ ID NO: 3947 - DNA, 66 bp, Synthetic construct; identical to SEQ ID NO: 1287
  source 1..66: mol_type = other DNA

SEQ ID NO: 3948 - DNA, 66 bp, Synthetic construct; identical to SEQ ID NO: 1857
  source 1..66: mol_type = other DNA

SEQ ID NO: 3949 - DNA, 66 bp, Synthetic construct; identical to SEQ ID NO: 66
  source 1..66: mol_type = other DNA

SEQ ID NO: 3950 - DNA, 66 bp, Synthetic construct; identical to SEQ ID NO: 2167
  source 1..66: mol_type = other DNA

SEQ ID NO: 3951 - DNA, 66 bp, Synthetic construct; identical to SEQ ID NO: 20
  source 1..66: mol_type = other DNA

SEQ ID NO: 3952 - DNA, 66 bp, Synthetic construct; identical to SEQ ID NO: 387
  source 1..66: mol_type = other DNA

SEQ ID NO: 3953 - DNA, 66 bp, Synthetic construct; identical to SEQ ID NO: 1876
  source 1..66: mol_type = other DNA

SEQ ID NO: 3954 - DNA, 66 bp, Synthetic construct; identical to SEQ ID NO: 1449
  source 1..66: mol_type = other DNA

SEQ ID NO: 3955 - DNA, 66 bp, Synthetic construct; identical to SEQ ID NO: 1768
  source 1..66: mol_type = other DNA

SEQ ID NO: 3956 - DNA, 66 bp, Synthetic construct; identical to SEQ ID NO: 2473
  source 1..66: mol_type = other DNA

SEQ ID NO: 3957 - DNA, 66 bp, Synthetic construct; identical to SEQ ID NO: 447
  source 1..66: mol_type = other DNA

SEQ ID NO: 3958 - DNA, 66 bp, Synthetic construct; identical to SEQ ID NO: 1136
  source 1..66: mol_type = other DNA

SEQ ID NO: 3959 - DNA, 66 bp, Synthetic construct; identical to SEQ ID NO: 56
  source 1..66: mol_type = other DNA

SEQ ID NO: 3960 - DNA, 66 bp, Synthetic construct; identical to SEQ ID NO: 406
  source 1..66: mol_type = other DNA

SEQ ID NO: 3961 - DNA, 66 bp, Synthetic construct; identical to SEQ ID NO: 235
  source 1..66: mol_type = other DNA

SEQ ID NO: 3962 - DNA, 66 bp, Synthetic construct; identical to SEQ ID NO: 354
  source 1..66: mol_type = other DNA

SEQ ID NO: 3963 - DNA, 66 bp, Synthetic construct; identical to SEQ ID NO: 1483
  source 1..66: mol_type = other DNA

SEQ ID NO: 3964 - DNA, 66 bp, Synthetic construct; identical to SEQ ID NO: 772
  source 1..66: mol_type = other DNA

SEQ ID NO: 3965 - DNA, 66 bp, Synthetic construct; identical to SEQ ID NO: 413
  source 1..66: mol_type = other DNA

SEQ ID NO: 3966 - DNA, 66 bp, Synthetic construct; identical to SEQ ID NO: 1168
  source 1..66: mol_type = other DNA

SEQ ID NO: 3967 - DNA, 66 bp, Synthetic construct; identical to SEQ ID NO: 1401
  source 1..66: mol_type = other DNA

SEQ ID NO: 3968 - DNA, 66 bp, Synthetic construct; identical to SEQ ID NO: 768
  source 1..66: mol_type = other DNA

SEQ ID NO: 3969 - DNA, 66 bp, Synthetic construct; identical to SEQ ID NO: 996
  source 1..66: mol_type = other DNA

SEQ ID NO: 3970 - DNA, 66 bp, Synthetic construct; identical to SEQ ID NO: 258
  source 1..66: mol_type = other DNA

SEQ ID NO: 3971 - DNA, 66 bp, Synthetic construct; identical to SEQ ID NO: 1571
  source 1..66: mol_type = other DNA

SEQ ID NO: 3972 - DNA, 66 bp, Synthetic construct; identical to SEQ ID NO: 1242
  source 1..66: mol_type = other DNA

SEQ ID NO: 3973 - DNA, 66 bp, Synthetic construct; identical to SEQ ID NO: 1408
  source 1..66: mol_type = other DNA

SEQ ID NO: 3974 - DNA, 66 bp, Synthetic construct; identical to SEQ ID NO: 326
  source 1..66: mol_type = other DNA

SEQ ID NO: 3975 - DNA, 66 bp, Synthetic construct; identical to SEQ ID NO: 2232
  source 1..66: mol_type = other DNA

SEQ ID NO: 3976 - DNA, 66 bp, Synthetic construct; identical to SEQ ID NO: 1513
  source 1..66: mol_type = other DNA

SEQ ID NO: 3977 - DNA, 66 bp, Synthetic construct; identical to SEQ ID NO: 1211
  source 1..66: mol_type = other DNA

SEQ ID NO: 3978 - DNA, 66 bp, Synthetic construct; identical to SEQ ID NO: 45
  source 1..66: mol_type = other DNA

SEQ ID NO: 3979 - DNA, 66 bp, Synthetic construct; identical to SEQ ID NO: 36
  source 1..66: mol_type = other DNA

SEQ ID NO: 3980 - DNA, 66 bp, Synthetic construct; identical to SEQ ID NO: 195
  source 1..66: mol_type = other DNA

SEQ ID NO: 3981 - DNA, 66 bp, Synthetic construct; identical to SEQ ID NO: 823
  source 1..66: mol_type = other DNA

SEQ ID NO: 3982 - DNA, 66 bp, Synthetic construct; identical to SEQ ID NO: 1576
  source 1..66: mol_type = other DNA

SEQ ID NO: 3983 - DNA, 66 bp, Synthetic construct; identical to SEQ ID NO: 102
  source 1..66: mol_type = other DNA

SEQ ID NO: 3984 - DNA, 66 bp, Synthetic construct; identical to SEQ ID NO: 536
  source 1..66: mol_type = other DNA

SEQ ID NO: 3985 - DNA, 66 bp, Synthetic construct; identical to SEQ ID NO: 1368
  source 1..66: mol_type = other DNA

SEQ ID NO: 3986 - DNA, 66 bp, Synthetic construct; identical to SEQ ID NO: 153
  source 1..66: mol_type = other DNA

SEQ ID NO: 3987 - DNA, 66 bp, Synthetic construct; identical to SEQ ID NO: 688
  source 1..66: mol_type = other DNA

SEQ ID NO: 3988 - DNA, 66 bp, Synthetic construct; identical to SEQ ID NO: 2057
  source 1..66: mol_type = other DNA

SEQ ID NO: 3989 - DNA, 66 bp, Synthetic construct; identical to SEQ ID NO: 548
  source 1..66: mol_type = other DNA

SEQ ID NO: 3990 - DNA, 66 bp, Synthetic construct; identical to SEQ ID NO: 194
  source 1..66: mol_type = other DNA

SEQ ID NO: 3991 - DNA, 66 bp, Synthetic construct; identical to SEQ ID NO: 676
  source 1..66: mol_type = other DNA

SEQ ID NO: 3992 - DNA, 66 bp, Synthetic construct; identical to SEQ ID NO: 1611
  source 1..66: mol_type = other DNA

SEQ ID NO: 3993 - DNA, 66 bp, Synthetic construct; identical to SEQ ID NO: 2310
  source 1..66: mol_type = other DNA

SEQ ID NO: 3994 - DNA, 66 bp, Synthetic construct; identical to SEQ ID NO: 1477
  source 1..66: mol_type = other DNA

SEQ ID NO: 3995 - DNA, 66 bp, Synthetic construct; identical to SEQ ID NO: 295
  source 1..66: mol_type = other DNA

SEQ ID NO: 3996 - DNA, 66 bp, Synthetic construct; identical to SEQ ID NO: 1354
  source 1..66: mol_type = other DNA

SEQ ID NO: 3997 - DNA, 66 bp, Synthetic construct; identical to SEQ ID NO: 1676
  source 1..66: mol_type = other DNA

SEQ ID NO: 3998 - DNA, 66 bp, Synthetic construct; identical to SEQ ID NO: 879
  source 1..66: mol_type = other DNA

SEQ ID NO: 3999 - DNA, 66 bp, Synthetic construct; identical to SEQ ID NO: 683
  source 1..66: mol_type = other DNA

SEQ ID NO: 4000 - DNA, 66 bp, Synthetic construct; identical to SEQ ID NO: 28
  source 1..66: mol_type = other DNA

SEQ ID NO: 4001 - DNA, 66 bp, Synthetic construct; identical to SEQ ID NO: 1560
  source 1..66: mol_type = other DNA

SEQ ID NO: 4002 - DNA, 66 bp, Synthetic construct; identical to SEQ ID NO: 336
  source 1..66: mol_type = other DNA

SEQ ID NO: 4003 - DNA, 66 bp, Synthetic construct; identical to SEQ ID NO: 1661
  source 1..66: mol_type = other DNA

SEQ ID NO: 4004 - DNA, 66 bp, Synthetic construct; identical to SEQ ID NO: 1373
  source 1..66: mol_type = other DNA

SEQ ID NO: 4005 - DNA, 66 bp, Synthetic construct; identical to SEQ ID NO: 271
  source 1..66: mol_type = other DNA

SEQ ID NO: 4006 - DNA, 66 bp, Synthetic construct; identical to SEQ ID NO: 1096
  source 1..66: mol_type = other DNA

SEQ ID NO: 4007 - DNA, 66 bp, Synthetic construct; identical to SEQ ID NO: 1080
  source 1..66: mol_type = other DNA

SEQ ID NO: 4008 - DNA, 66 bp, Synthetic construct; identical to SEQ ID NO: 1432
  source 1..66: mol_type = other DNA

SEQ ID NO: 4009 - DNA, 66 bp, Synthetic construct; identical to SEQ ID NO: 234
  source 1..66: mol_type = other DNA

SEQ ID NO: 4010 - DNA, 66 bp, Synthetic construct; identical to SEQ ID NO: 2129
  source 1..66: mol_type = other DNA

SEQ ID NO: 4011 - DNA, 66 bp, Synthetic construct; identical to SEQ ID NO: 93
  source 1..66: mol_type = other DNA

SEQ ID NO: 4012 - DNA, 66 bp, Synthetic construct; identical to SEQ ID NO: 266
  source 1..66: mol_type = other DNA

SEQ ID NO: 4013 - DNA, 66 bp, Synthetic construct; identical to SEQ ID NO: 1260
  source 1..66: mol_type = other DNA

SEQ ID NO: 4014 - DNA, 66 bp, Synthetic construct; identical to SEQ ID NO: 534
  source 1..66: mol_type = other DNA

SEQ ID NO: 4015 - DNA, 66 bp, Synthetic construct; identical to SEQ ID NO: 325
  source 1..66: mol_type = other DNA

SEQ ID NO: 4016 - DNA, 66 bp, Synthetic construct; identical to SEQ ID NO: 442
  source 1..66: mol_type = other DNA

SEQ ID NO: 4017 - DNA, 66 bp, Synthetic construct; identical to SEQ ID NO: 1270
  source 1..66: mol_type = other DNA

SEQ ID NO: 4018 - DNA, 66 bp, Synthetic construct; identical to SEQ ID NO: 1377
  source 1..66: mol_type = other DNA

SEQ ID NO: 4019 - DNA, 66 bp, Synthetic construct; identical to SEQ ID NO: 1245
  source 1..66: mol_type = other DNA

SEQ ID NO: 4020 - DNA, 66 bp, Synthetic construct; identical to SEQ ID NO: 212
  source 1..66: mol_type = other DNA

SEQ ID NO: 4021 - DNA, 66 bp, Synthetic construct; identical to SEQ ID NO: 1547
  source 1..66: mol_type = other DNA

SEQ ID NO: 4022 - DNA, 66 bp, Synthetic construct; identical to SEQ ID NO: 783
  source 1..66: mol_type = other DNA

SEQ ID NO: 4023 - DNA, 66 bp, Synthetic construct; identical to SEQ ID NO: 856
  source 1..66: mol_type = other DNA

SEQ ID NO: 4024 - DNA, 66 bp, Synthetic construct; identical to SEQ ID NO: 898
  source 1..66: mol_type = other DNA

SEQ ID NO: 4025 - DNA, 66 bp, Synthetic construct; identical to SEQ ID NO: 1305
  source 1..66: mol_type = other DNA

SEQ ID NO: 4026 - DNA, 66 bp, Synthetic construct; identical to SEQ ID NO: 18
  source 1..66: mol_type = other DNA

SEQ ID NO: 4027 - DNA, 66 bp, Synthetic construct; identical to SEQ ID NO: 1360
  source 1..66: mol_type = other DNA

SEQ ID NO: 4028 - DNA, 66 bp, Synthetic construct; identical to SEQ ID NO: 2162
  source 1..66: mol_type = other DNA

SEQ ID NO: 4029 - DNA, 66 bp, Synthetic construct; identical to SEQ ID NO: 1210
  source 1..66: mol_type = other DNA

SEQ ID NO: 4030 - DNA, 66 bp, Synthetic construct; identical to SEQ ID NO: 1396
  source 1..66: mol_type = other DNA

SEQ ID NO: 4031 - DNA, 66 bp, Synthetic construct; identical to SEQ ID NO: 1319
  source 1..66: mol_type = other DNA

SEQ ID NO: 4032 - DNA, 66 bp, Synthetic construct; identical to SEQ ID NO: 1712
  source 1..66: mol_type = other DNA

SEQ ID NO: 4033 - DNA, 66 bp, Synthetic construct; identical to SEQ ID NO: 1228
  source 1..66: mol_type = other DNA

SEQ ID NO: 4034 - DNA, 66 bp, Synthetic construct; identical to SEQ ID NO: 359
  source 1..66: mol_type = other DNA

SEQ ID NO: 4035 - DNA, 66 bp, Synthetic construct; identical to SEQ ID NO: 305
  source 1..66: mol_type = other DNA

SEQ ID NO: 4036 - DNA, 66 bp, Synthetic construct; identical to SEQ ID NO: 570
  source 1..66: mol_type = other DNA

SEQ ID NO: 4037 - DNA, 66 bp, Synthetic construct; identical to SEQ ID NO: 316
  source 1..66: mol_type = other DNA

SEQ ID NO: 4038 - DNA, 66 bp, Synthetic construct; identical to SEQ ID NO: 1444
  source 1..66: mol_type = other DNA

SEQ ID NO: 4039 - DNA, 66 bp, Synthetic construct; identical to SEQ ID NO: 1546
  source 1..66: mol_type = other DNA

SEQ ID NO: 4040 - DNA, 66 bp, Synthetic construct; identical to SEQ ID NO: 409
  source 1..66: mol_type = other DNA

SEQ ID NO: 4041 - DNA, 66 bp, Synthetic construct; identical to SEQ ID NO: 246
  source 1..66: mol_type = other DNA

SEQ ID NO: 4042 - DNA, 66 bp, Synthetic construct; identical to SEQ ID NO: 837
  source 1..66: mol_type = other DNA

SEQ ID NO: 4043 - DNA, 66 bp, Synthetic construct; identical to SEQ ID NO: 611
  source 1..66: mol_type = other DNA

SEQ ID NO: 4044 - DNA, 66 bp, Synthetic construct; identical to SEQ ID NO: 216
  source 1..66: mol_type = other DNA

SEQ ID NO: 4045 - DNA, 66 bp, Synthetic construct; identical to SEQ ID NO: 863
  source 1..66: mol_type = other DNA

SEQ ID NO: 4046 - DNA, 66 bp, Synthetic construct; identical to SEQ ID NO: 154
  source 1..66: mol_type = other DNA

SEQ ID NO: 4047 - DNA, 66 bp, Synthetic construct; identical to SEQ ID NO: 273
  source 1..66: mol_type = other DNA

SEQ ID NO: 4048 - DNA, 66 bp, Synthetic construct; identical to SEQ ID NO: 1488
  source 1..66: mol_type = other DNA

SEQ ID NO: 4049 - DNA, 66 bp, Synthetic construct; identical to SEQ ID NO: 2265
  source 1..66: mol_type = other DNA

SEQ ID NO: 4050 - DNA, 66 bp, Synthetic construct; identical to SEQ ID NO: 352
  source 1..66: mol_type = other DNA

SEQ ID NO: 4051 - DNA, 66 bp, Synthetic construct; identical to SEQ ID NO: 2217
  source 1..66: mol_type = other DNA

SEQ ID NO: 4052 - DNA, 66 bp, Synthetic construct; identical to SEQ ID NO: 702
  source 1..66: mol_type = other DNA

SEQ ID NO: 4053 - DNA, 66 bp, Synthetic construct; identical to SEQ ID NO: 804
  source 1..66: mol_type = other DNA

SEQ ID NO: 4054 - DNA, 66 bp, Synthetic construct; identical to SEQ ID NO: 857
  source 1..66: mol_type = other DNA

SEQ ID NO: 4055 - DNA, 66 bp, Synthetic construct; identical to SEQ ID NO: 1241
  source 1..66: mol_type = other DNA

SEQ ID NO: 4056 - DNA, 66 bp, Synthetic construct; identical to SEQ ID NO: 689
  source 1..66: mol_type = other DNA

SEQ ID NO: 4057 - DNA, 66 bp, Synthetic construct; identical to SEQ ID NO: 31
  source 1..66: mol_type = other DNA

SEQ ID NO: 4058 - DNA, 66 bp, Synthetic construct; identical to SEQ ID NO: 2173
  source 1..66: mol_type = other DNA

SEQ ID NO: 4059 - DNA, 66 bp, Synthetic construct; identical to SEQ ID NO: 1561
  source 1..66: mol_type = other DNA

SEQ ID NO: 4060 - DNA, 66 bp, Synthetic construct; identical to SEQ ID NO: 2413
  source 1..66: mol_type = other DNA

SEQ ID NO: 4061 - DNA, 66 bp, Synthetic construct; identical to SEQ ID NO: 261
  source 1..66: mol_type = other DNA

SEQ ID NO: 4062 - DNA, 66 bp, Synthetic construct; identical to SEQ ID NO: 915
  source 1..66: mol_type = other DNA

SEQ ID NO: 4063 - DNA, 66 bp, Synthetic construct; identical to SEQ ID NO: 1037
  source 1..66: mol_type = other DNA

SEQ ID NO: 4064 - DNA, 66 bp, Synthetic construct; identical to SEQ ID NO: 1151
  source 1..66: mol_type = other DNA

SEQ ID NO: 4065 - DNA, 66 bp, Synthetic construct; identical to SEQ ID NO: 1848
  source 1..66: mol_type = other DNA

SEQ ID NO: 4066 - DNA, 66 bp, Synthetic construct; identical to SEQ ID NO: 597
  source 1..66: mol_type = other DNA

SEQ ID NO: 4067 - DNA, 66 bp, Synthetic construct; identical to SEQ ID NO: 185
  source 1..66: mol_type = other DNA

SEQ ID NO: 4068 - DNA, 66 bp, Synthetic construct; identical to SEQ ID NO: 137
  source 1..66: mol_type = other DNA

SEQ ID NO: 4069 - DNA, 66 bp, Synthetic construct; identical to SEQ ID NO: 1642
  source 1..66: mol_type = other DNA

SEQ ID NO: 4070 - DNA, 66 bp, Synthetic construct; identical to SEQ ID NO: 619
  source 1..66: mol_type = other DNA

SEQ ID NO: 4071 - DNA, 66 bp, Synthetic construct; identical to SEQ ID NO: 145
  source 1..66: mol_type = other DNA

SEQ ID NO: 4072 - DNA, 66 bp, Synthetic construct; identical to SEQ ID NO: 2142
  source 1..66: mol_type = other DNA

SEQ ID NO: 4073 - DNA, 66 bp, Synthetic construct; identical to SEQ ID NO: 646
  source 1..66: mol_type = other DNA

SEQ ID NO: 4074 - DNA, 66 bp, Synthetic construct; identical to SEQ ID NO: 267
  source 1..66: mol_type = other DNA

SEQ ID NO: 4075 - DNA, 66 bp, Synthetic construct; identical to SEQ ID NO: 662
  source 1..66: mol_type = other DNA

SEQ ID NO: 4076 - DNA, 66 bp, Synthetic construct; identical to SEQ ID NO: 331
  source 1..66: mol_type = other DNA

SEQ ID NO: 4077 - DNA, 66 bp, Synthetic construct; identical to SEQ ID NO: 599
  source 1..66: mol_type = other DNA

SEQ ID NO: 4078 - DNA, 66 bp, Synthetic construct; identical to SEQ ID NO: 208
  source 1..66: mol_type = other DNA

SEQ ID NO: 4079 - DNA, 66 bp, Synthetic construct; identical to SEQ ID NO: 1425
  source 1..66: mol_type = other DNA

SEQ ID NO: 4080 - DNA, 66 bp, Synthetic construct; identical to SEQ ID NO: 1278
  source 1..66: mol_type = other DNA

SEQ ID NO: 4081 - DNA, 66 bp, Synthetic construct; identical to SEQ ID NO: 152
  source 1..66: mol_type = other DNA

SEQ ID NO: 4082 - DNA, 66 bp, Synthetic construct; identical to SEQ ID NO: 41
  source 1..66: mol_type = other DNA

SEQ ID NO: 4083 - DNA, 66 bp, Synthetic construct; identical to SEQ ID NO: 1633
  source 1..66: mol_type = other DNA

SEQ ID NO: 4084 - DNA, 66 bp, Synthetic construct; identical to SEQ ID NO: 1315
  source 1..66: mol_type = other DNA

SEQ ID NO: 4085 - DNA, 66 bp, Synthetic construct; identical to SEQ ID NO: 1337
  source 1..66: mol_type = other DNA

SEQ ID NO: 4086 - DNA, 66 bp, Synthetic construct; identical to SEQ ID NO: 12
  source 1..66: mol_type = other DNA

SEQ ID NO: 4087 - DNA, 66 bp, Synthetic construct; identical to SEQ ID NO: 586
  source 1..66: mol_type = other DNA

SEQ ID NO: 4088 - DNA, 66 bp, Synthetic construct; identical to SEQ ID NO: 260
  source 1..66: mol_type = other DNA

SEQ ID NO: 4089 - DNA, 66 bp, Synthetic construct; identical to SEQ ID NO: 2701
  source 1..66: mol_type = other DNA

SEQ ID NO: 4090 - DNA, 66 bp, Synthetic construct; identical to SEQ ID NO: 1599
  source 1..66: mol_type = other DNA

SEQ ID NO: 4091 - DNA, 66 bp, Synthetic construct; identical to SEQ ID NO: 2281
  source 1..66: mol_type = other DNA

SEQ ID NO: 4092 - DNA, 66 bp, Synthetic construct; identical to SEQ ID NO: 1035
  source 1..66: mol_type = other DNA

SEQ ID NO: 4093 - DNA, 66 bp, Synthetic construct
  source 1..66: mol_type = other DNA
ttcacctgtgatatttgtggggcacgatttactcagaaaggtaacctcctccgccacattaaactg

SEQ ID NO: 4094 - DNA, 66 bp, Synthetic construct; identical to SEQ ID NO: 1686
  source 1..66: mol_type = other DNA

SEQ ID NO: 4095 - DNA, 66 bp, Synthetic construct; identical to SEQ ID NO: 128
  source 1..66: mol_type = other DNA

SEQ ID NO: 4096 - DNA, 66 bp, Synthetic construct; identical to SEQ ID NO: 1219
  source 1..66: mol_type = other DNA

SEQ ID NO: 4097 - DNA, 66 bp, Synthetic construct; identical to SEQ ID NO: 1321
  source 1..66: mol_type = other DNA

SEQ ID NO: 4098 - DNA, 66 bp, Synthetic construct; identical to SEQ ID NO: 1467
  source 1..66: mol_type = other DNA

SEQ ID NO: 4099 - DNA, 66 bp, Synthetic construct; identical to SEQ ID NO: 1862
  source 1..66: mol_type = other DNA

SEQ ID NO: 4100 - DNA, 66 bp, Synthetic construct; identical to SEQ ID NO: 35
  source 1..66: mol_type = other DNA

SEQ ID NO: 4101 - DNA, 66 bp, Synthetic construct; identical to SEQ ID NO: 1120
  source 1..66: mol_type = other DNA

SEQ ID NO: 4102 - DNA, 66 bp, Synthetic construct; identical to SEQ ID NO: 493
  source 1..66: mol_type = other DNA

SEQ ID NO: 4103 - DNA, 66 bp, Synthetic construct; identical to SEQ ID NO: 342
  source 1..66: mol_type = other DNA

SEQ ID NO: 4104 - DNA, 66 bp, Synthetic construct; identical to SEQ ID NO: 940
  source 1..66: mol_type = other DNA

SEQ ID NO: 4105 - DNA, 66 bp, Synthetic construct; identical to SEQ ID NO: 868
  source 1..66: mol_type = other DNA

SEQ ID NO: 4106 - DNA, 66 bp, Synthetic construct; identical to SEQ ID NO: 1429
  source 1..66: mol_type = other DNA

SEQ ID NO: 4107 - DNA, 66 bp, Synthetic construct; identical to SEQ ID NO: 1190
  source 1..66: mol_type = other DNA

SEQ ID NO: 4108 - DNA, 66 bp, Synthetic construct; identical to SEQ ID NO: 1493
  source 1..66: mol_type = other DNA

SEQ ID NO: 4109 - DNA, 66 bp, Synthetic construct; identical to SEQ ID NO: 1331
  source 1..66: mol_type = other DNA

SEQ ID NO: 4110 - DNA, 66 bp, Synthetic construct; identical to SEQ ID NO: 2490
  source 1..66: mol_type = other DNA

SEQ ID NO: 4111 - DNA, 66 bp, Synthetic construct; identical to SEQ ID NO: 1171
  source 1..66: mol_type = other DNA

SEQ ID NO: 4112 - DNA, 66 bp, Synthetic construct; identical to SEQ ID NO: 801
  source 1..66: mol_type = other DNA

SEQ ID NO: 4113 - DNA, 66 bp, Synthetic construct; identical to SEQ ID NO: 1259
  source 1..66: mol_type = other DNA

SEQ ID NO: 4114 - DNA, 66 bp, Synthetic construct; identical to SEQ ID NO: 392
  source 1..66: mol_type = other DNA

SEQ ID NO: 4115 - DNA, 66 bp, Synthetic construct; identical to SEQ ID NO: 1345
  source 1..66: mol_type = other DNA

SEQ ID NO: 4116 - DNA, 66 bp, Synthetic construct; identical to SEQ ID NO: 250
  source 1..66: mol_type = other DNA

SEQ ID NO: 4117 - DNA, 66 bp, Synthetic construct; identical to SEQ ID NO: 456
  source 1..66: mol_type = other DNA

SEQ ID NO: 4118 - DNA, 66 bp, Synthetic construct; identical to SEQ ID NO: 841
  source 1..66: mol_type = other DNA

SEQ ID NO: 4119 - DNA, 66 bp, Synthetic construct; identical to SEQ ID NO: 225
  source 1..66: mol_type = other DNA

SEQ ID NO: 4120 - DNA, 66 bp, Synthetic construct; identical to SEQ ID NO: 620
  source 1..66: mol_type = other DNA

SEQ ID NO: 4121 - DNA, 66 bp, Synthetic construct; identical to SEQ ID NO: 1558
  source 1..66: mol_type = other DNA

SEQ ID NO: 4122 - DNA, 66 bp, Synthetic construct; identical to SEQ ID NO: 117
  source 1..66: mol_type = other DNA

SEQ ID NO: 4123 - DNA, 66 bp, Synthetic construct; identical to SEQ ID NO: 782
  source 1..66: mol_type = other DNA

SEQ ID NO: 4124 - DNA, 66 bp, Synthetic construct; identical to SEQ ID NO: 2317
  source 1..66: mol_type = other DNA

SEQ ID NO: 4125 - DNA, 66 bp, Synthetic construct; identical to SEQ ID NO: 1498
  source 1..66: mol_type = other DNA

SEQ ID NO: 4126 - DNA, 66 bp, Synthetic construct; identical to SEQ ID NO: 289
  source 1..66: mol_type = other DNA

SEQ ID NO: 4127 - DNA, 66 bp, Synthetic construct; identical to SEQ ID NO: 2182
  source 1..66: mol_type = other DNA

SEQ ID NO: 4128 - DNA, 66 bp, Synthetic construct; identical to SEQ ID NO: 1555
  source 1..66: mol_type = other DNA

SEQ ID NO: 4129 - DNA, 66 bp, Synthetic construct; identical to SEQ ID NO: 1551
  source 1..66: mol_type = other DNA

SEQ ID NO: 4130 - DNA, 66 bp, Synthetic construct; identical to SEQ ID NO: 292
  source 1..66: mol_type = other DNA

SEQ ID NO: 4131 - DNA, 66 bp, Synthetic construct; identical to SEQ ID NO: 713
  source 1..66: mol_type = other DNA

SEQ ID NO: 4132 - DNA, 66 bp, Synthetic construct; identical to SEQ ID NO: 613
  source 1..66: mol_type = other DNA

SEQ ID NO: 4133 - DNA, 66 bp, Synthetic construct; identical to SEQ ID NO: 1753
  source 1..66: mol_type = other DNA

SEQ ID NO: 4134 - DNA, 66 bp, Synthetic construct; identical to SEQ ID NO: 251
  source 1..66: mol_type = other DNA

SEQ ID NO: 4135 - DNA, 66 bp, Synthetic construct; identical to SEQ ID NO: 2596
  source 1..66: mol_type = other DNA

SEQ ID NO: 4136 - DNA, 66 bp, Synthetic construct; identical to SEQ ID NO: 591
  source 1..66: mol_type = other DNA

SEQ ID NO: 4137 - DNA, 66 bp, Synthetic construct; identical to SEQ ID NO: 1940
  source 1..66: mol_type = other DNA

SEQ ID NO: 4138 - DNA, 66 bp, Synthetic construct; identical to SEQ ID NO: 47
  source 1..66: mol_type = other DNA

SEQ ID NO: 4139 - DNA, 66 bp, Synthetic construct; identical to SEQ ID NO: 2496
  source 1..66: mol_type = other DNA

SEQ ID NO: 4140 - DNA, 66 bp, Synthetic construct; identical to SEQ ID NO: 992
  source 1..66: mol_type = other DNA

SEQ ID NO: 4141 - DNA, 66 bp, Synthetic construct; identical to SEQ ID NO: 159
  source 1..66: mol_type = other DNA

SEQ ID NO: 4142 - DNA, 66 bp, Synthetic construct; identical to SEQ ID NO: 1308
  source 1..66: mol_type = other DNA

SEQ ID NO: 4143 - DNA, 66 bp, Synthetic construct; identical to SEQ ID NO: 365
  source 1..66: mol_type = other DNA

SEQ ID NO: 4144 - DNA, 66 bp, Synthetic construct; identical to SEQ ID NO: 484
  source 1..66: mol_type = other DNA

SEQ ID NO: 4145 - DNA, 66 bp, Synthetic construct
  source 1..66: mol_type = other DNA
ttctattgtaacatctgtggggcaagatttactcagaaaggtaacctcctccgccacattaaactg

SEQ ID NO: 4146 - DNA, 66 bp, Synthetic construct; identical to SEQ ID NO: 566
  source 1..66: mol_type = other DNA

SEQ ID NO: 4147 - DNA, 66 bp, Synthetic construct; identical to SEQ ID NO: 1632
  source 1..66: mol_type = other DNA

SEQ ID NO: 4148 - DNA, 66 bp, Synthetic construct
  source 1..66: mol_type = other DNA
ttcttttgtgagcagtgtggggcaaggtttactcagaaaggtaacctcctccgccacattaaactg

SEQ ID NO: 4149 - DNA, 66 bp, Synthetic construct; identical to SEQ ID NO: 2172
  source 1..66: mol_type = other DNA

SEQ ID NO: 4150 - DNA, 66 bp, Synthetic construct; identical to SEQ ID NO: 324
  source 1..66: mol_type = other DNA

SEQ ID NO: 4151 - DNA, 66 bp, Synthetic construct; identical to SEQ ID NO: 1583
  source 1..66: mol_type = other DNA

SEQ ID NO: 4152 - DNA, 66 bp, Synthetic construct; identical to SEQ ID NO: 248
  source 1..66: mol_type = other DNA

SEQ ID NO: 4153 - DNA, 66 bp, Synthetic construct; identical to SEQ ID NO: 1216
  source 1..66: mol_type = other DNA

SEQ ID NO: 4154 - DNA, 66 bp, Synthetic construct; identical to SEQ ID NO: 515
  source 1..66: mol_type = other DNA

SEQ ID NO: 4155 - DNA, 66 bp, Synthetic construct; identical to SEQ ID NO: 482
  source 1..66: mol_type = other DNA

SEQ ID NO: 4156 - DNA, 66 bp, Synthetic construct; identical to SEQ ID NO: 1528
  source 1..66: mol_type = other DNA

SEQ ID NO: 4157 - DNA, 66 bp, Synthetic construct; identical to SEQ ID NO: 797
  source 1..66: mol_type = other DNA

SEQ ID NO: 4158 - DNA, 66 bp, Synthetic construct; identical to SEQ ID NO: 2262
  source 1..66: mol_type = other DNA

SEQ ID NO: 4159 - DNA, 66 bp, Synthetic construct; identical to SEQ ID NO: 1324
  source 1..66: mol_type = other DNA

SEQ ID NO: 4160 - DNA, 66 bp, Synthetic construct; identical to SEQ ID NO: 1254
  source 1..66: mol_type = other DNA

SEQ ID NO: 4161 - DNA, 66 bp, Synthetic construct; identical to SEQ ID NO: 539
  source 1..66: mol_type = other DNA

SEQ ID NO: 4162 - DNA, 66 bp, Synthetic construct; identical to SEQ ID NO: 339
  source 1..66: mol_type = other DNA

SEQ ID NO: 4163 - DNA, 66 bp, Synthetic construct; identical to SEQ ID NO: 2017
  source 1..66: mol_type = other DNA

SEQ ID NO: 4164 - DNA, 66 bp, Synthetic construct; identical to SEQ ID NO: 1874
  source 1..66: mol_type = other DNA

SEQ ID NO: 4165 - DNA, 66 bp, Synthetic construct; identical to SEQ ID NO: 364
  source 1..66: mol_type = other DNA

SEQ ID NO: 4166 - DNA, 66 bp, Synthetic construct; identical to SEQ ID NO: 204
  source 1..66: mol_type = other DNA

SEQ ID NO: 4167 - DNA, 66 bp, Synthetic construct; identical to SEQ ID NO: 96
  source 1..66: mol_type = other DNA

SEQ ID NO: 4168 - DNA, 66 bp, Synthetic construct; identical to SEQ ID NO: 286
  source 1..66: mol_type = other DNA

SEQ ID NO: 4169 - DNA, 66 bp, Synthetic construct; identical to SEQ ID NO: 1353
  source 1..66: mol_type = other DNA

SEQ ID NO: 4170 - DNA, 66 bp, Synthetic construct; identical to SEQ ID NO: 477
  source 1..66: mol_type = other DNA

SEQ ID NO: 4171 - DNA, 66 bp, Synthetic construct; identical to SEQ ID NO: 1204
  source 1..66: mol_type = other DNA

SEQ ID NO: 4172 - DNA, 66 bp, Synthetic construct; identical to SEQ ID NO: 2070
  source 1..66: mol_type = other DNA

SEQ ID NO: 4173 - DNA, 66 bp, Synthetic construct; identical to SEQ ID NO: 1769
  source 1..66: mol_type = other DNA

SEQ ID NO: 4174 - DNA, 66 bp, Synthetic construct; identical to SEQ ID NO: 574
  source 1..66: mol_type = other DNA

SEQ ID NO: 4175 - DNA, 66 bp, Synthetic construct; identical to SEQ ID NO: 604
  source 1..66: mol_type = other DNA

SEQ ID NO: 4176 - DNA, 66 bp, Synthetic construct; identical to SEQ ID NO: 1386
  source 1..66: mol_type = other DNA

SEQ ID NO: 4177 - DNA, 66 bp, Synthetic construct; identical to SEQ ID NO: 819
  source 1..66: mol_type = other DNA

SEQ ID NO: 4178 - DNA, 66 bp, Synthetic construct; identical to SEQ ID NO: 1357
  source 1..66: mol_type = other DNA

SEQ ID NO: 4179 - DNA, 66 bp, Synthetic construct; identical to SEQ ID NO: 869
  source 1..66: mol_type = other DNA

SEQ ID NO: 4180 - DNA, 66 bp, Synthetic construct; identical to SEQ ID NO: 1194
  source 1..66: mol_type = other DNA

SEQ ID NO: 4181 - DNA, 66 bp, Synthetic construct; identical to SEQ ID NO: 1409
  source 1..66: mol_type = other DNA

SEQ ID NO: 4182 - DNA, 66 bp, Synthetic construct; identical to SEQ ID NO: 1606
  source 1..66: mol_type = other DNA

SEQ ID NO: 4183 - DNA, 66 bp, Synthetic construct; identical to SEQ ID NO: 906
  source 1..66: mol_type = other DNA

SEQ ID NO: 4184 - DNA, 66 bp, Synthetic construct; identical to SEQ ID NO: 1342
  source 1..66: mol_type = other DNA

SEQ ID NO: 4185 - DNA, 66 bp, Synthetic construct; identical to SEQ ID NO: 708
  source 1..66: mol_type = other DNA

SEQ ID NO: 4186 - DNA, 66 bp, Synthetic construct; identical to SEQ ID NO: 1119
  source 1..66: mol_type = other DNA

SEQ ID NO: 4187 - DNA, 66 bp, Synthetic construct; identical to SEQ ID NO: 306
  source 1..66: mol_type = other DNA

SEQ ID NO: 4188 - DNA, 66 bp, Synthetic construct; identical to SEQ ID NO: 998
  source 1..66: mol_type = other DNA

SEQ ID NO: 4189 - DNA, 66 bp, Synthetic construct; identical to SEQ ID NO: 2266
  source 1..66: mol_type = other DNA

SEQ ID NO: 4190 - DNA, 66 bp, Synthetic construct; identical to SEQ ID NO: 1677
  source 1..66: mol_type = other DNA

SEQ ID NO: 4191 - DNA, 66 bp, Synthetic construct; identical to SEQ ID NO: 1222
  source 1..66: mol_type = other DNA

SEQ ID NO: 4192 - DNA, 66 bp, Synthetic construct; identical to SEQ ID NO: 2313
  source 1..66: mol_type = other DNA

SEQ ID NO: 4193 - DNA, 66 bp, Synthetic construct; identical to SEQ ID NO: 1313
  source 1..66: mol_type = other DNA

SEQ ID NO: 4194 - DNA, 66 bp, Synthetic construct; identical to SEQ ID NO: 791
  source 1..66: mol_type = other DNA

SEQ ID NO: 4195 - DNA, 66 bp, Synthetic construct; identical to SEQ ID NO: 1539
  source 1..66: mol_type = other DNA

SEQ ID NO: 4196 - DNA, 66 bp, Synthetic construct; identical to SEQ ID NO: 822
  source 1..66: mol_type = other DNA

SEQ ID NO: 4197 - DNA, 66 bp, Synthetic construct; identical to SEQ ID NO: 677
  source 1..66: mol_type = other DNA

SEQ ID NO: 4198 - DNA, 66 bp, Synthetic construct; identical to SEQ ID NO: 472
  source 1..66: mol_type = other DNA

SEQ ID NO: 4199 - DNA, 66 bp, Synthetic construct; identical to SEQ ID NO: 2523
  source 1..66: mol_type = other DNA

SEQ ID NO: 4200 - DNA, 66 bp, Synthetic construct; identical to SEQ ID NO: 463
  source 1..66: mol_type = other DNA

SEQ ID NO: 4201 - DNA, 66 bp, Synthetic construct; identical to SEQ ID NO: 1603
  source 1..66: mol_type = other DNA

SEQ ID NO: 4202 - DNA, 66 bp, Synthetic construct; identical to SEQ ID NO: 2655
  source 1..66: mol_type = other DNA

SEQ ID NO: 4203 - DNA, 66 bp, Synthetic construct; identical to SEQ ID NO: 440
  source 1..66: mol_type = other DNA

SEQ ID NO: 4204 - DNA, 66 bp, Synthetic construct; identical to SEQ ID NO: 943
  source 1..66: mol_type = other DNA

SEQ ID NO: 4205 - DNA, 66 bp, Synthetic construct; identical to SEQ ID NO: 746
  source 1..66: mol_type = other DNA

SEQ ID NO: 4206 - DNA, 66 bp, Synthetic construct; identical to SEQ ID NO: 2432
  source 1..66: mol_type = other DNA

SEQ ID NO: 4207 - DNA, 66 bp, Synthetic construct; identical to SEQ ID NO: 1062
  source 1..66: mol_type = other DNA

SEQ ID NO: 4208 - DNA, 66 bp, Synthetic construct; identical to SEQ ID NO: 301
  source 1..66: mol_type = other DNA

SEQ ID NO: 4209 - DNA, 66 bp, Synthetic construct
  source 1..66: mol_type = other DNA
ttcatctgtccacaatgtggggcaccatttactcagaaaggtaacctcctccgccacattaaactg

SEQ ID NO: 4210 - DNA, 66 bp, Synthetic construct; identical to SEQ ID NO: 1442
  source 1..66: mol_type = other DNA

SEQ ID NO: 4211 - DNA, 66 bp, Synthetic construct; identical to SEQ ID NO: 317
  source 1..66: mol_type = other DNA

SEQ ID NO: 4212 - DNA, 66 bp, Synthetic construct; identical to SEQ ID NO: 1557
  source 1..66: mol_type = other DNA

SEQ ID NO: 4213 - DNA, 66 bp, Synthetic construct; identical to SEQ ID NO: 1198
  source 1..66: mol_type = other DNA

SEQ ID NO: 4214 - DNA, 66 bp, Synthetic construct; identical to SEQ ID NO: 2145
  source 1..66: mol_type = other DNA

SEQ ID NO: 4215 - DNA, 66 bp, Synthetic construct; identical to SEQ ID NO: 1364
  source 1..66: mol_type = other DNA

SEQ ID NO: 4216 - DNA, 66 bp, Synthetic construct; identical to SEQ ID NO: 1675
  source 1..66: mol_type = other DNA

SEQ ID NO: 4217 - DNA, 66 bp, Synthetic construct; identical to SEQ ID NO: 2493
  source 1..66: mol_type = other DNA

SEQ ID NO: 4218 - DNA, 66 bp, Synthetic construct; identical to SEQ ID NO: 1320
  source 1..66: mol_type = other DNA

SEQ ID NO: 4219 - DNA, 66 bp, Synthetic construct; identical to SEQ ID NO: 386
  source 1..66: mol_type = other DNA

SEQ ID NO: 4220 - DNA, 66 bp, Synthetic construct; identical to SEQ ID NO: 563
  source 1..66: mol_type = other DNA

SEQ ID NO: 4221 - DNA, 66 bp, Synthetic construct; identical to SEQ ID NO: 1376
  source 1..66: mol_type = other DNA

SEQ ID NO: 4222 - DNA, 66 bp, Synthetic construct; identical to SEQ ID NO: 489
  source 1..66: mol_type = other DNA

SEQ ID NO: 4223 - DNA, 66 bp, Synthetic construct; identical to SEQ ID NO: 82
  source 1..66: mol_type = other DNA

SEQ ID NO: 4224 - DNA, 66 bp, Synthetic construct; identical to SEQ ID NO: 1173
  source 1..66: mol_type = other DNA

SEQ ID NO: 4225 - DNA, 66 bp, Synthetic construct; identical to SEQ ID NO: 2930
  source 1..66: mol_type = other DNA

SEQ ID NO: 4226 - DNA, 66 bp, Synthetic construct; identical to SEQ ID NO: 980
  source 1..66: mol_type = other DNA

SEQ ID NO: 4227 - DNA, 66 bp, Synthetic construct; identical to SEQ ID NO: 2299
  source 1..66: mol_type = other DNA

SEQ ID NO: 4228 - DNA, 66 bp, Synthetic construct; identical to SEQ ID NO: 977
  source 1..66: mol_type = other DNA

SEQ ID NO: 4229 - DNA, 66 bp, Synthetic construct; identical to SEQ ID NO: 1180
  source 1..66: mol_type = other DNA

SEQ ID NO: 4230 - DNA, 66 bp, Synthetic construct; identical to SEQ ID NO: 2435
  source 1..66: mol_type = other DNA

SEQ ID NO: 4231 - DNA, 66 bp, Synthetic construct; identical to SEQ ID NO: 1681
  source 1..66: mol_type = other DNA

SEQ ID NO: 4232 - DNA, 66 bp, Synthetic construct; identical to SEQ ID NO: 395
  source 1..66: mol_type = other DNA

SEQ ID NO: 4233 - DNA, 66 bp, Synthetic construct; identical to SEQ ID NO: 1697
  source 1..66: mol_type = other DNA

SEQ ID NO: 4234 - DNA, 66 bp, Synthetic construct; identical to SEQ ID NO: 407
  source 1..66: mol_type = other DNA

SEQ ID NO: 4235 - DNA, 66 bp, Synthetic construct; identical to SEQ ID NO: 1223
  source 1..66: mol_type = other DNA

SEQ ID NO: 4236 - DNA, 66 bp, Synthetic construct; identical to SEQ ID NO: 2041
  source 1..66: mol_type = other DNA

SEQ ID NO: 4237 - DNA, 66 bp, Synthetic construct; identical to SEQ ID NO: 2340
  source 1..66: mol_type = other DNA

SEQ ID NO: 4238 - DNA, 66 bp, Synthetic construct; identical to SEQ ID NO: 2030
  source 1..66: mol_type = other DNA

SEQ ID NO: 4239 - DNA, 66 bp, Synthetic construct; identical to SEQ ID NO: 403
  source 1..66: mol_type = other DNA

SEQ ID NO: 4240 - DNA, 66 bp, Synthetic construct; identical to SEQ ID NO: 259
  source 1..66: mol_type = other DNA

SEQ ID NO: 4241 - DNA, 66 bp, Synthetic construct; identical to SEQ ID NO: 795
  source 1..66: mol_type = other DNA

SEQ ID NO: 4242 - DNA, 66 bp, Synthetic construct; identical to SEQ ID NO: 424
  source 1..66: mol_type = other DNA

SEQ ID NO: 4243 - DNA, 66 bp, Synthetic construct; identical to SEQ ID NO: 1116
  source 1..66: mol_type = other DNA

SEQ ID NO: 4244 - DNA, 66 bp, Synthetic construct; identical to SEQ ID NO: 172
  source 1..66: mol_type = other DNA

SEQ ID NO: 4245 - DNA, 66 bp, Synthetic construct; identical to SEQ ID NO: 1448
  source 1..66: mol_type = other DNA

SEQ ID NO: 4246 - DNA, 66 bp, Synthetic construct; identical to SEQ ID NO: 1457
  source 1..66: mol_type = other DNA

SEQ ID NO: 4247 - DNA, 66 bp, Synthetic construct; identical to SEQ ID NO: 2486
  source 1..66: mol_type = other DNA

SEQ ID NO: 4248 - DNA, 66 bp, Synthetic construct; identical to SEQ ID NO: 233
  source 1..66: mol_type = other DNA

SEQ ID NO: 4249 - DNA, 66 bp, Synthetic construct; identical to SEQ ID NO: 511
  source 1..66: mol_type = other DNA

SEQ ID NO: 4250 - DNA, 66 bp, Synthetic construct; identical to SEQ ID NO: 2459
  source 1..66: mol_type = other DNA

SEQ ID NO: 4251 - DNA, 66 bp, Synthetic construct; identical to SEQ ID NO: 144
  source 1..66: mol_type = other DNA

SEQ ID NO: 4252 - DNA, 66 bp, Synthetic construct; identical to SEQ ID NO: 2570
  source 1..66: mol_type = other DNA

SEQ ID NO: 4253 - DNA, 66 bp, Synthetic construct; identical to SEQ ID NO: 241
  source 1..66: mol_type = other DNA

SEQ ID NO: 4254 - DNA, 66 bp, Synthetic construct
  source 1..66: mol_type = other DNA
ttcatctgtgatatctgtggggcagcctttactcagaaaggtaacctcctccgccacattaaactg

SEQ ID NO: 4255 - DNA, 66 bp, Synthetic construct; identical to SEQ ID NO: 1011
  source 1..66: mol_type = other DNA

SEQ ID NO: 4256 - DNA, 66 bp, Synthetic construct; identical to SEQ ID NO: 1629
  source 1..66: mol_type = other DNA

SEQ ID NO: 4257 - DNA, 66 bp, Synthetic construct; identical to SEQ ID NO: 231
  source 1..66: mol_type = other DNA

SEQ ID NO: 4258 - DNA, 66 bp, Synthetic construct; identical to SEQ ID NO: 100
  source 1..66: mol_type = other DNA

SEQ ID NO: 4259 - DNA, 66 bp, Synthetic construct; identical to SEQ ID NO: 938
  source 1..66: mol_type = other DNA

SEQ ID NO: 4260 - DNA, 66 bp, Synthetic construct; identical to SEQ ID NO: 894
  source 1..66: mol_type = other DNA

SEQ ID NO: 4261 - DNA, 66 bp, Synthetic construct; identical to SEQ ID NO: 1013
  source 1..66: mol_type = other DNA

SEQ ID NO: 4262 - DNA, 66 bp, Synthetic construct; identical to SEQ ID NO: 239
  source 1..66: mol_type = other DNA

SEQ ID NO: 4263 - DNA, 66 bp, Synthetic construct; identical to SEQ ID NO: 952
  source 1..66: mol_type = other DNA

SEQ ID NO: 4264 - DNA, 66 bp, Synthetic construct; identical to SEQ ID NO: 1717
  source 1..66: mol_type = other DNA

SEQ ID NO: 4265 - DNA, 66 bp, Synthetic construct; identical to SEQ ID NO: 606
  source 1..66: mol_type = other DNA

SEQ ID NO: 4266 - DNA, 66 bp, Synthetic construct; identical to SEQ ID NO: 1541
  source 1..66: mol_type = other DNA

SEQ ID NO: 4267 - DNA, 66 bp, Synthetic construct; identical to SEQ ID NO: 38
  source 1..66: mol_type = other DNA

SEQ ID NO: 4268 - DNA, 66 bp, Synthetic construct; identical to SEQ ID NO: 221
  source 1..66: mol_type = other DNA

SEQ ID NO: 4269 - DNA, 66 bp, Synthetic construct; identical to SEQ ID NO: 633
  source 1..66: mol_type = other DNA

SEQ ID NO: 4270 - DNA, 66 bp, Synthetic construct; identical to SEQ ID NO: 1083
  source 1..66: mol_type = other DNA

SEQ ID NO: 4271 - DNA, 66 bp, Synthetic construct; identical to SEQ ID NO: 2136
  source 1..66: mol_type = other DNA

SEQ ID NO: 4272 - DNA, 66 bp, Synthetic construct; identical to SEQ ID NO: 49
  source 1..66: mol_type = other DNA

SEQ ID NO: 4273 - DNA, 66 bp, Synthetic construct; identical to SEQ ID NO: 1472
  source 1..66: mol_type = other DNA

SEQ ID NO: 4274 - DNA, 66 bp, Synthetic construct; identical to SEQ ID NO: 1648
  source 1..66: mol_type = other DNA

SEQ ID NO: 4275 - DNA, 66 bp, Synthetic construct; identical to SEQ ID NO: 121
  source 1..66: mol_type = other DNA

SEQ ID NO: 4276 - DNA, 66 bp, Synthetic construct; identical to SEQ ID NO: 1175
  source 1..66: mol_type = other DNA

SEQ ID NO: 4277 - DNA, 66 bp, Synthetic construct; identical to SEQ ID NO: 558
  source 1..66: mol_type = other DNA

SEQ ID NO: 4278 - DNA, 66 bp, Synthetic construct; identical to SEQ ID NO: 44
  source 1..66: mol_type = other DNA

SEQ ID NO: 4279 - DNA, 66 bp, Synthetic construct; identical to SEQ ID NO: 581
  source 1..66: mol_type = other DNA

SEQ ID NO: 4280 - DNA, 66 bp, Synthetic construct; identical to SEQ ID NO: 126
  source 1..66: mol_type = other DNA

SEQ ID NO: 4281 - DNA, 66 bp, Synthetic construct; identical to SEQ ID NO: 1559
  source 1..66: mol_type = other DNA

SEQ ID NO: 4282 - DNA, 66 bp, Synthetic construct; identical to SEQ ID NO: 2376
  source 1..66: mol_type = other DNA

SEQ ID NO: 4283 - DNA, 66 bp, Synthetic construct; identical to SEQ ID NO: 2110
  source 1..66: mol_type = other DNA

SEQ ID NO: 4284 - DNA, 66 bp, Synthetic construct; identical to SEQ ID NO: 294
  source 1..66: mol_type = other DNA

SEQ ID NO: 4285 - DNA, 66 bp, Synthetic construct; identical to SEQ ID NO: 1249
  source 1..66: mol_type = other DNA

SEQ ID NO: 4286 - DNA, 66 bp, Synthetic construct; identical to SEQ ID NO: 311
  source 1..66: mol_type = other DNA

SEQ ID NO: 4287 - DNA, 66 bp, Synthetic construct; identical to SEQ ID NO: 973
  source 1..66: mol_type = other DNA

SEQ ID NO: 4288 - DNA, 66 bp, Synthetic construct; identical to SEQ ID NO: 58
  source 1..66: mol_type = other DNA

SEQ ID NO: 4289 - DNA, 66 bp, Synthetic construct; identical to SEQ ID NO: 184
  source 1..66: mol_type = other DNA

SEQ ID NO: 4290 - DNA, 66 bp, Synthetic construct; identical to SEQ ID NO: 2103
  source 1..66: mol_type = other DNA

SEQ ID NO: 4291 - DNA, 66 bp, Synthetic construct; identical to SEQ ID NO: 348
  source 1..66: mol_type = other DNA

SEQ ID NO: 4292 - DNA, 66 bp, Synthetic construct; identical to SEQ ID NO: 54
  source 1..66: mol_type = other DNA

SEQ ID NO: 4293 - DNA, 66 bp, Synthetic construct; identical to SEQ ID NO: 1578
  source 1..66: mol_type = other DNA

SEQ ID NO: 4294 - DNA, 66 bp, Synthetic construct; identical to SEQ ID NO: 1176
  source 1..66: mol_type = other DNA

SEQ ID NO: 4295 - DNA, 66 bp, Synthetic construct; identical to SEQ ID NO: 1635
  source 1..66: mol_type = other DNA

SEQ ID NO: 4296 - DNA, 66 bp, Synthetic construct; identical to SEQ ID NO: 1521
  source 1..66: mol_type = other DNA

SEQ ID NO: 4297 - DNA, 66 bp, Synthetic construct
  source 1..66: mol_type = other DNA
ttccactgtcccgtgtgtggggcacgctttactcagaaaggtaacctcctccgccacattaaactg

SEQ ID NO: 4298 - DNA, 66 bp, Synthetic construct; identical to SEQ ID NO: 684
  source 1..66: mol_type = other DNA

SEQ ID NO: 4299 - DNA, 66 bp, Synthetic construct; identical to SEQ ID NO: 1664
  source 1..66: mol_type = other DNA

SEQ ID NO: 4300 - DNA, 66 bp, Synthetic construct; identical to SEQ ID NO: 1272
  source 1..66: mol_type = other DNA

SEQ ID NO: 4301 - DNA, 66 bp, Synthetic construct
  source 1..66: mol_type = other DNA
ttcgtgtgtgacatttgtggggcaggatttactcagaaaggtaacctcctccgccacattaaactg

SEQ ID NO: 4302 - DNA, 66 bp, Synthetic construct; identical to SEQ ID NO: 85
  source 1..66: mol_type = other DNA

SEQ ID NO: 4303 - DNA, 66 bp, Synthetic construct; identical to SEQ ID NO: 1155
  source 1..66: mol_type = other DNA

SEQ ID NO: 4304 - DNA, 66 bp, Synthetic construct; identical to SEQ ID NO: 1366
  source 1..66: mol_type = other DNA

SEQ ID NO: 4305 - DNA, 66 bp, Synthetic construct; identical to SEQ ID NO: 2532
  source 1..66: mol_type = other DNA

SEQ ID NO: 4306 - DNA, 66 bp, Synthetic construct; identical to SEQ ID NO: 681
  source 1..66: mol_type = other DNA

SEQ ID NO: 4307 - DNA, 66 bp, Synthetic construct; identical to SEQ ID NO: 976
  source 1..66: mol_type = other DNA

SEQ ID NO: 4308 - DNA, 66 bp, Synthetic construct; identical to SEQ ID NO: 1280
  source 1..66: mol_type = other DNA

SEQ ID NO: 4309 - DNA, 66 bp, Synthetic construct; identical to SEQ ID NO: 524
  source 1..66: mol_type = other DNA

SEQ ID NO: 4310 - DNA, 66 bp, Synthetic construct; identical to SEQ ID NO: 1575
  source 1..66: mol_type = other DNA

SEQ ID NO: 4311 - DNA, 66 bp, Synthetic construct; identical to SEQ ID NO: 2468
  source 1..66: mol_type = other DNA

SEQ ID NO: 4312 - DNA, 66 bp, Synthetic construct; identical to SEQ ID NO: 2921
  source 1..66: mol_type = other DNA

SEQ ID NO: 4313 - DNA, 66 bp, Synthetic construct; identical to SEQ ID NO: 330
  source 1..66: mol_type = other DNA

SEQ ID NO: 4314 - DNA, 66 bp, Synthetic construct; identical to SEQ ID NO: 598
  source 1..66: mol_type = other DNA

SEQ ID NO: 4315 - DNA, 66 bp, Synthetic construct; identical to SEQ ID NO: 1592
  source 1..66: mol_type = other DNA

SEQ ID NO: 4316 - DNA, 66 bp, Synthetic construct; identical to SEQ ID NO: 2222
  source 1..66: mol_type = other DNA

SEQ ID NO: 4317 - DNA, 66 bp, Synthetic construct; identical to SEQ ID NO: 1662
  source 1..66: mol_type = other DNA

SEQ ID NO: 4318 - DNA, 66 bp, Synthetic construct; identical to SEQ ID NO: 50
  source 1..66: mol_type = other DNA

SEQ ID NO: 4319 - DNA, 66 bp, Synthetic construct; identical to SEQ ID NO: 2387
  source 1..66: mol_type = other DNA

SEQ ID NO: 4320 - DNA, 66 bp, Synthetic construct; identical to SEQ ID NO: 321
  source 1..66: mol_type = other DNA

SEQ ID NO: 4321 - DNA, 66 bp, Synthetic construct; identical to SEQ ID NO: 1527
  source 1..66: mol_type = other DNA

SEQ ID NO: 4322 - DNA, 66 bp, Synthetic construct; identical to SEQ ID NO: 416
  source 1..66: mol_type = other DNA

SEQ ID NO: 4323 - DNA, 66 bp, Synthetic construct; identical to SEQ ID NO: 1244
  source 1..66: mol_type = other DNA

SEQ ID NO: 4324 - DNA, 66 bp, Synthetic construct; identical to SEQ ID NO: 1838
  source 1..66: mol_type = other DNA

SEQ ID NO: 4325 - DNA, 66 bp, Synthetic construct; identical to SEQ ID NO: 789
  source 1..66: mol_type = other DNA

SEQ ID NO: 4326 - DNA, 66 bp, Synthetic construct; identical to SEQ ID NO: 1160
  source 1..66: mol_type = other DNA

SEQ ID NO: 4327 - DNA, 66 bp, Synthetic construct; identical to SEQ ID NO: 1641
  source 1..66: mol_type = other DNA

SEQ ID NO: 4328 - DNA, 66 bp, Synthetic construct; identical to SEQ ID NO: 2027
  source 1..66: mol_type = other DNA

SEQ ID NO: 4329 - DNA, 66 bp, Synthetic construct; identical to SEQ ID NO: 15
  source 1..66: mol_type = other DNA

SEQ ID NO: 4330 - DNA, 66 bp, Synthetic construct; identical to SEQ ID NO: 624
  source 1..66: mol_type = other DNA

SEQ ID NO: 4331 - DNA, 66 bp, Synthetic construct; identical to SEQ ID NO: 1347
  source 1..66: mol_type = other DNA

SEQ ID NO: 4332 - DNA, 66 bp, Synthetic construct; identical to SEQ ID NO: 1012
  source 1..66: mol_type = other DNA

SEQ ID NO: 4333 - DNA, 66 bp, Synthetic construct; identical to SEQ ID NO: 1634
  source 1..66: mol_type = other DNA

SEQ ID NO: 4334 - DNA, 66 bp, Synthetic construct; identical to SEQ ID NO: 3415
  source 1..66: mol_type = other DNA

SEQ ID NO: 4335 - DNA, 66 bp, Synthetic construct; identical to SEQ ID NO: 876
  source 1..66: mol_type = other DNA

SEQ ID NO: 4336 - DNA, 66 bp, Synthetic construct; identical to SEQ ID NO: 59
  source 1..66: mol_type = other DNA

SEQ ID NO: 4337 - DNA, 66 bp, Synthetic construct; identical to SEQ ID NO: 405
  source 1..66: mol_type = other DNA

SEQ ID NO: 4338 - DNA, 66 bp, Synthetic construct; identical to SEQ ID NO: 2419
  source 1..66: mol_type = other DNA

SEQ ID NO: 4339 - DNA, 66 bp, Synthetic construct
  source 1..66: mol_type = other DNA
ttcatttgtcctatatgtggggcacactttactcagaaaggtaacctcctccgccacattaaactg

SEQ ID NO: 4340 - DNA, 66 bp, Synthetic construct; identical to SEQ ID NO: 1660
  source 1..66: mol_type = other DNA

SEQ ID NO: 4341 - DNA, 66 bp, Synthetic construct; identical to SEQ ID NO: 435
  source 1..66: mol_type = other DNA

SEQ ID NO: 4342 - DNA, 66 bp, Synthetic construct; identical to SEQ ID NO: 1318
  source 1..66: mol_type = other DNA

SEQ ID NO: 4343 - DNA, 66 bp, Synthetic construct; identical to SEQ ID NO: 481
  source 1..66: mol_type = other DNA

SEQ ID NO: 4344 - DNA, 66 bp, Synthetic construct; identical to SEQ ID NO: 2620
  source 1..66: mol_type = other DNA

SEQ ID NO: 4345 - DNA, 66 bp, Synthetic construct; identical to SEQ ID NO: 542
  source 1..66: mol_type = other DNA

SEQ ID NO: 4346 - DNA, 66 bp, Synthetic construct; identical to SEQ ID NO: 335
  source 1..66: mol_type = other DNA

SEQ ID NO: 4347 - DNA, 66 bp, Synthetic construct; identical to SEQ ID NO: 533
  source 1..66: mol_type = other DNA

SEQ ID NO: 4348 - DNA, 66 bp, Synthetic construct; identical to SEQ ID NO: 1061
  source 1..66: mol_type = other DNA

SEQ ID NO: 4349 - DNA, 66 bp, Synthetic construct; identical to SEQ ID NO: 1131
  source 1..66: mol_type = other DNA

SEQ ID NO: 4350 - DNA, 66 bp, Synthetic construct; identical to SEQ ID NO: 796
  source 1..66: mol_type = other DNA

SEQ ID NO: 4351 - DNA, 66 bp, Synthetic construct; identical to SEQ ID NO: 1463
  source 1..66: mol_type = other DNA

SEQ ID NO: 4352 - DNA, 66 bp, Synthetic construct; identical to SEQ ID NO: 516
  source 1..66: mol_type = other DNA

SEQ ID NO: 4353 - DNA, 66 bp, Synthetic construct; identical to SEQ ID NO: 1618
  source 1..66: mol_type = other DNA

SEQ ID NO: 4354 - DNA, 66 bp, Synthetic construct; identical to SEQ ID NO: 485
  source 1..66: mol_type = other DNA

SEQ ID NO: 4355 - DNA, 66 bp, Synthetic construct; identical to SEQ ID NO: 123
  source 1..66: mol_type = other DNA

SEQ ID NO: 4356 - DNA, 66 bp, Synthetic construct
  source 1..66: mol_type = other DNA
ttcttttgcccaatctgcgggcgacagtttactcagaaaggtaacctcctccgccacattaaactg

SEQ ID NO: 4357 - DNA, 66 bp, Synthetic construct; identical to SEQ ID NO: 72
  source 1..66: mol_type = other DNA

SEQ ID NO: 4358 - DNA, 66 bp, Synthetic construct; identical to SEQ ID NO: 475
  source 1..66: mol_type = other DNA

SEQ ID NO: 4359 - DNA, 66 bp, Synthetic construct; identical to SEQ ID NO: 844
  source 1..66: mol_type = other DNA

SEQ ID NO: 4360 - DNA, 66 bp, Synthetic construct; identical to SEQ ID NO: 356
  source 1..66: mol_type = other DNA

SEQ ID NO: 4361 - DNA, 66 bp, Synthetic construct; identical to SEQ ID NO: 344
  source 1..66: mol_type = other DNA

SEQ ID NO: 4362 - DNA, 66 bp, Synthetic construct; identical to SEQ ID NO: 1114
  source 1..66: mol_type = other DNA

SEQ ID NO: 4363 - DNA, 66 bp, Synthetic construct; identical to SEQ ID NO: 402
  source 1..66: mol_type = other DNA

SEQ ID NO: 4364 - DNA, 66 bp, Synthetic construct; identical to SEQ ID NO: 23
  source 1..66: mol_type = other DNA

SEQ ID NO: 4365 - DNA, 66 bp, Synthetic construct; identical to SEQ ID NO: 814
  source 1..66: mol_type = other DNA

SEQ ID NO: 4366 - DNA, 66 bp, Synthetic construct; identical to SEQ ID NO: 1424
  source 1..66: mol_type = other DNA

SEQ ID NO: 4367 - DNA, 66 bp, Synthetic construct; identical to SEQ ID NO: 981
  source 1..66: mol_type = other DNA

SEQ ID NO: 4368 - DNA, 66 bp, Synthetic construct; identical to SEQ ID NO: 900
  source 1..66: mol_type = other DNA

SEQ ID NO: 4369 - DNA, 66 bp, Synthetic construct; identical to SEQ ID NO: 1036
  source 1..66: mol_type = other DNA

SEQ ID NO: 4370 - DNA, 66 bp, Synthetic construct; identical to SEQ ID NO: 479
  source 1..66: mol_type = other DNA

SEQ ID NO: 4371 - DNA, 66 bp, Synthetic construct
  source 1..66: mol_type = other DNA
ttcggctgtaatatatgtggggcatgctttactcagaaaggtaacctcctccgccacattaaactg

SEQ ID NO: 4372 - DNA, 66 bp, Synthetic construct; identical to SEQ ID NO: 653
  source 1..66: mol_type = other DNA

SEQ ID NO: 4373 - DNA, 66 bp, Synthetic construct; identical to SEQ ID NO: 2269
  source 1..66: mol_type = other DNA

SEQ ID NO: 4374 - DNA, 66 bp, Synthetic construct; identical to SEQ ID NO: 773
  source 1..66: mol_type = other DNA

SEQ ID NO: 4375 - DNA, 66 bp, Synthetic construct; identical to SEQ ID NO: 1624
  source 1..66: mol_type = other DNA

SEQ ID NO: 4376 - DNA, 66 bp, Synthetic construct; identical to SEQ ID NO: 2489
  source 1..66: mol_type = other DNA

SEQ ID NO: 4377 - DNA, 66 bp, Synthetic construct; identical to SEQ ID NO: 7
  source 1..66: mol_type = other DNA

SEQ ID NO: 4378 - DNA, 66 bp, Synthetic construct; identical to SEQ ID NO: 419
  source 1..66: mol_type = other DNA

SEQ ID NO: 4379 - DNA, 66 bp, Synthetic construct; identical to SEQ ID NO: 1147
  source 1..66: mol_type = other DNA

SEQ ID NO: 4380 - DNA, 66 bp, Synthetic construct
  source 1..66: mol_type = other DNA
ttctattgtccgcaatgtggggcaaggtttactcagaaaggtaacctcctccgccacattaaactg

SEQ ID NO: 4381 - DNA, 66 bp, Synthetic construct; identical to SEQ ID NO: 148
  source 1..66: mol_type = other DNA

SEQ ID NO: 4382 - DNA, 66 bp, Synthetic construct
  source 1..66: mol_type = other DNA
ttcgtgtgtcctcagtgtggggcaccttttactcagaaaggtaacctcctccgccacattaaactg

SEQ ID NO: 4383 - DNA, 66 bp, Synthetic construct; identical to SEQ ID NO: 617
  source 1..66: mol_type = other DNA

SEQ ID NO: 4384 - DNA, 66 bp, Synthetic construct; identical to SEQ ID NO: 647
  source 1..66: mol_type = other DNA

SEQ ID NO: 4385 - DNA, 66 bp, Synthetic construct; identical to SEQ ID NO: 1079
  source 1..66: mol_type = other DNA

SEQ ID NO: 4386 - DNA, 66 bp, Synthetic construct; identical to SEQ ID NO: 2192
  source 1..66: mol_type = other DNA

SEQ ID NO: 4387 - DNA, 66 bp, Synthetic construct
  source 1..66: mol_type = other DNA
ttcgtctgtgatatatgtggggcaagttttactcagaaaggtaacctcctccgccacattaaactg

SEQ ID NO: 4388 - DNA, 66 bp, Synthetic construct; identical to SEQ ID NO: 895
  source 1..66: mol_type = other DNA

SEQ ID NO: 4389 - DNA, 66 bp, Synthetic construct
  source 1..66: mol_type = other DNA
ttcgcctgtaacatctgtggggcagtctttactcagaaaggtaacctcctccgccacattaaactg

SEQ ID NO: 4390 - DNA, 66 bp, Synthetic construct; identical to SEQ ID NO: 62
  source 1..66: mol_type = other DNA

SEQ ID NO: 4391 - DNA, 66 bp, Synthetic construct; identical to SEQ ID NO: 691
  source 1..66: mol_type = other DNA

SEQ ID NO: 4392 - DNA, 66 bp, Synthetic construct; identical to SEQ ID NO: 26
  source 1..66: mol_type = other DNA

SEQ ID NO: 4393 - DNA, 66 bp, Synthetic construct; identical to SEQ ID NO: 1654
  source 1..66: mol_type = other DNA

SEQ ID NO: 4394 - DNA, 66 bp, Synthetic construct; identical to SEQ ID NO: 2216
  source 1..66: mol_type = other DNA

SEQ ID NO: 4395 - DNA, 66 bp, Synthetic construct; identical to SEQ ID NO: 970
  source 1..66: mol_type = other DNA

SEQ ID NO: 4396 - DNA, 66 bp, Synthetic construct
  source 1..66: mol_type = other DNA
ctccactgtcctatctgcggattcaactgtactcagaaaggtaacctcctccgccacattaaactg

SEQ ID NO: 4397 - DNA, 66 bp, Synthetic construct; identical to SEQ ID NO: 1285
  source 1..66: mol_type = other DNA

SEQ ID NO: 4398 - DNA, 66 bp, Synthetic construct; identical to SEQ ID NO: 744
  source 1..66: mol_type = other DNA

SEQ ID NO: 4399 - DNA, 66 bp, Synthetic construct; identical to SEQ ID NO: 420
  source 1..66: mol_type = other DNA

SEQ ID NO: 4400 - DNA, 66 bp, Synthetic construct; identical to SEQ ID NO: 1071
  source 1..66: mol_type = other DNA

SEQ ID NO: 4401 - DNA, 66 bp, Synthetic construct; identical to SEQ ID NO: 547
  source 1..66: mol_type = other DNA

SEQ ID NO: 4402 - DNA, 66 bp, Synthetic construct; identical to SEQ ID NO: 925
  source 1..66: mol_type = other DNA

SEQ ID NO: 4403 - DNA, 66 bp, Synthetic construct; identical to SEQ ID NO: 1025
  source 1..66: mol_type = other DNA

SEQ ID NO: 4404 - DNA, 66 bp, Synthetic construct; identical to SEQ ID NO: 302
  source 1..66: mol_type = other DNA

SEQ ID NO: 4405 - DNA, 66 bp, Synthetic construct
  source 1..66: mol_type = other DNA
ttcatttgtgacatatgtggggcaggctttactcagaaaggtaacctcctccgccacattaaactg

SEQ ID NO: 4406 - DNA, 66 bp, Synthetic construct; identical to SEQ ID NO: 979
  source 1..66: mol_type = other DNA

SEQ ID NO: 4407 - DNA, 66 bp, Synthetic construct; identical to SEQ ID NO: 2109
  source 1..66: mol_type = other DNA

SEQ ID NO: 4408 - DNA, 66 bp, Synthetic construct; identical to SEQ ID NO: 1074
  source 1..66: mol_type = other DNA

SEQ ID NO: 4409 - DNA, 66 bp, Synthetic construct
  source 1..66: mol_type = other DNA
ttctattgtgagatctgtggggcatggtttactcagaaaggtaacctcctccgccacattaaactg

SEQ ID NO: 4410 - DNA, 66 bp, Synthetic construct; identical to SEQ ID NO: 1601
  source 1..66: mol_type = other DNA

SEQ ID NO: 4411 - DNA, 66 bp, Synthetic construct
  source 1..66: mol_type = other DNA
ttcatatgtccaatctgtggggcatactttactcagaaaggtaacctcctccgccacattaaactg

SEQ ID NO: 4412 - DNA, 66 bp, Synthetic construct; identical to SEQ ID NO: 103
  source 1..66: mol_type = other DNA

SEQ ID NO: 4413 - DNA, 66 bp, Synthetic construct; identical to SEQ ID NO: 376
  source 1..66: mol_type = other DNA

SEQ ID NO: 4414 - DNA, 66 bp, Synthetic construct; identical to SEQ ID NO: 1086
  source 1..66: mol_type = other DNA

SEQ ID NO: 4415 - DNA, 66 bp, Synthetic construct; identical to SEQ ID NO: 1389
  source 1..66: mol_type = other DNA

SEQ ID NO: 4416 - DNA, 66 bp, Synthetic construct; identical to SEQ ID NO: 1177
  source 1..66: mol_type = other DNA

SEQ ID NO: 4417 - DNA, 66 bp, Synthetic construct; identical to SEQ ID NO: 587
  source 1..66: mol_type = other DNA

SEQ ID NO: 4418 - DNA, 66 bp, Synthetic construct; identical to SEQ ID NO: 639
  source 1..66: mol_type = other DNA

SEQ ID NO: 4419 - DNA, 66 bp, Synthetic construct; identical to SEQ ID NO: 1052
  source 1..66: mol_type = other DNA

SEQ ID NO: 4420 - DNA, 66 bp, Synthetic construct; identical to SEQ ID NO: 78
  source 1..66: mol_type = other DNA

SEQ ID NO: 4421 - DNA, 66 bp, Synthetic construct; identical to SEQ ID NO: 760
  source 1..66: mol_type = other DNA

SEQ ID NO: 4422 - DNA, 66 bp, Synthetic construct; identical to SEQ ID NO: 2554
  source 1..66: mol_type = other DNA

SEQ ID NO: 4423 - DNA, 66 bp, Synthetic construct; identical to SEQ ID NO: 401
  source 1..66: mol_type = other DNA

SEQ ID NO: 4424 - DNA, 66 bp, Synthetic construct; identical to SEQ ID NO: 578
  source 1..66: mol_type = other DNA

SEQ ID NO: 4425 - DNA, 66 bp, Synthetic construct; identical to SEQ ID NO: 2324
  source 1..66: mol_type = other DNA

SEQ ID NO: 4426 - DNA, 66 bp, Synthetic construct; identical to SEQ ID NO: 1234
  source 1..66: mol_type = other DNA

SEQ ID NO: 4427 - DNA, 66 bp, Synthetic construct; identical to SEQ ID NO: 1455
  source 1..66: mol_type = other DNA

SEQ ID NO: 4428 - DNA, 66 bp, Synthetic construct; identical to SEQ ID NO: 384
  source 1..66: mol_type = other DNA

SEQ ID NO: 4429 - DNA, 66 bp, Synthetic construct; identical to SEQ ID NO: 2219
  source 1..66: mol_type = other DNA

SEQ ID NO: 4430 - DNA, 66 bp, Synthetic construct; identical to SEQ ID NO: 80
  source 1..66: mol_type = other DNA

SEQ ID NO: 4431 - DNA, 66 bp, Synthetic construct; identical to SEQ ID NO: 755
  source 1..66: mol_type = other DNA

SEQ ID NO: 4432 - DNA, 66 bp, Synthetic construct; identical to SEQ ID NO: 436
  source 1..66: mol_type = other DNA

SEQ ID NO: 4433 - DNA, 933 bp, synthetic construct
  source 1..933: mol_type = other DNA
cagtgttctagaggaatagccaccatgtccggattcaatgtcttaatggttcataagcgaagccatactggtgaagagacggacgtctcagaaaaaccttttaagtgtcacctctgcaactatgcatgccaaagaagagatgcgctcacgcgtgctgaagctgctgcaaaggaagctgcagctaaggaggctgcagctaaggctgtgagcaagggcgaggagctgttcaccggggtggtgcccatcctggtcgagctggacggcgacgtaaacggccacaagttcagcgtgtccggcgagggcgagggcgatgccacctatggcaaactgaccctgaaattcatctgcaccaccggcaaactgcccgtgccctggcccaccctcgtgaccaccctgacctatggcgtgcagtgcttcagccgctatcccgaccacatgaaacagcacgacttcttcaagtccgccatgcccgaaggctacgtccaggagcgcaccatcttcttcaaggacgacggcaactacaagacccgcgccgaggtgaagttcgagggcgacaccctggtgaaccgcatcgagctgaagggcatcgacttcaaggaggacggcaacatcctggggcacaagctggagtacaactacaacagccacaacgtctatatcatggccgacaagcagaagaacggcatcaaggtgaacttcaagatccgccacaacatcgaggacggcagcgtgcagctcgccgaccactatcagcagaacacccccatcggcgacggccccgtgctgctgcccgacaaccactatctgagcacccagtccgccctgagcaaagaccccaacgagaaacgcgatcacatggtcctgctggagttcgtgaccgccgccgggatcactctcggcatggatgaactgtataaataaggatccccacat

SEQ ID NO: 4434 - DNA, 130 bp, synthetic construct
  source 1..130: mol_type = other DNA
cagtgtgggctaccgtctcagtgaacgcccattccagtgtaatcagtgtggggcatcttttactcagaaaggtaacctcctccgccacattaaactgcacacaggggaaacgagacggtagccgccacat

SEQ ID NO: 4435 - DNA, 130 bp, synthetic construct
  source 1..130: mol_type = other DNA
cagtgtgggctaccgtctcagtgaacgcccattcgcctgtaatcagtgtggggcatcttttactcagaaaggtaacctcctccgccacattaaactgcacacaggggaaacgagacggtagccgccacat

SEQ ID NO: 4436 - DNA, 130 bp, synthetic construct
  source 1..130: mol_type = other DNA
cagtgtgggctaccgtctcagtgaacgcccattcgcctgtccaatctgtggggcatcttttactcagaaaggtaacctcctccgccacattaaactgcacacaggggaaacgagacggtagccgccacat

SEQ ID NO: 4437 - DNA, 130 bp, synthetic construct
  source 1..130: mol_type = other DNA
cagtgtgggctaccgtctcagtgaacgcccattctggtgtaatcagtgtggggcatcttttactcagaaaggtaacctcctccgccacattaaactgcacacaggggaaacgagacggtagccgccacat

SEQ ID NO: 4438 - DNA, 130 bp, synthetic construct
  source 1..130: mol_type = other DNA
cagtgtgggctaccgtctcagtgaacgcccattccattgtgagatctgtggggcaccatttactcagaaaggtaacctcctccgccacattaaactgcacacaggggaaacgagacggtagccgccacat

SEQ ID NO: 4439 - DNA, 130 bp, synthetic construct
  source 1..130: mol_type = other DNA
cagtgtgggctaccgtctcagtgaacgcccattcttctgtgaggtgtgtggggcaccctttactcagaaaggtaacctcctccgccacattaaactgcacacaggggaaacgagacggtagccgccacat

SEQ ID NO: 4440 - DNA, 130 bp, synthetic construct
  source 1..130: mol_type = other DNA
cagtgtgggctaccgtctcagtgaacgcccattctggtgtgaaatctgtggggcaaagtttactcagaaaggtaacctcctccgccacattaaactgcacacaggggaaacgagacggtagccgccacat

SEQ ID NO: 4441 - DNA, 130 bp, synthetic construct
  source 1..130: mol_type = other DNA
cagtgtgggctaccgtctcagtgaacgcccattcttctgtgacatatgtggggcaccctttactcagaaaggtaacctcctccgccacattaaactgcacacaggggaaacgagacggtagccgccacat

SEQ ID NO: 4442 - DNA, 130 bp, synthetic construct
  source 1..130: mol_type = other DNA
cagtgtgggctaccgtctcagtgaacgcccattcgcttgtgaagtgtgtggggcaaaatttactcagaaaggtaacctcctccgccacattaaactgcacacaggggaaacgagacggtagccgccacat

SEQ ID NO: 4443 - DNA, 130 bp, synthetic construct
  source 1..130: mol_type = other DNA
cagtgtgggctaccgtctcagtgaacgcccattctggtgtgagatttgtggggcatcttttactcagaaaggtaacctcctccgccacattaaactgcacacaggggaaacgagacggtagccgccacat

SEQ ID NO: 4444 - DNA, 130 bp, synthetic construct
  source 1..130: mol_type = other DNA
cagtgtgggctaccgtctcagtgaacgcccattctggtgtaacatctgtggggcacagtttactcagaaaggtaacctcctccgccacattaaactgcacacaggggaaacgagacggtagccgccacat

SEQ ID NO: 4445 - DNA, 130 bp, synthetic construct
  source 1..130: mol_type = other DNA
cagtgtgggctaccgtctcagtgaacgcccattctggtgtgatatctgtggggcagcctttactcagaaaggtaacctcctccgccacattaaactgcacacaggggaaacgagacggtagccgccacat

SEQ ID NO: 4446 - DNA, 130 bp, synthetic construct
  source 1..130: mol_type = other DNA
cagtgtgggctaccgtctcagtgaacgcccattccagtgtcctatctgtggggcaagctttactcagaaaggtaacctcctccgccacattaaactgcacacaggggaaacgagacggtagccgccacat